United States Patent Application Publication US 2023/0220115 A1 - sequence listing, part 2

SEQ ID NO: 2773 - protein, 709 aa, synthetic construct
  REGION 1..709: note = NLGN3 (Q9NZ94) SP+PP+ECD
MWLRLGPPSLSLSPKPTVGRSLCLTLWFLSLALRASTQAPAPTVNTHFGKLRGARVPLPSEILGPVDQYLGVPYAAPPIGEKRFLPPEPPPSWSGIRNATHFPPVCPQNIHTAVPEVMLPVWFTANLDIVATYIQEPNEDCLYLNVYVPTEDVKRISKECARKPNKKICRKGGSGAKKQGEDLADNDGDEDEDIRDSGAKPVMVYIHGGSYMEGTGNMIDGSILASYGNVIVITLNYRVGVLGFLSTGDQAAKGNYGLLDQIQALRWVSENIAFFGGDPRRITVFGSGIGASCVSLLTLSHHSEGLFQRAIIQSGSALSSWAVNYQPVKYTSLLADKVGCNVLDTVDMVDCLRQKSAKELVEQDIQPARYHVAFGPVIDGDVIPDDPEILMEQGEFLNYDIMLGVNQGEGLKFVEGVVDPEDGVSGTDFDYSVSNFVDNLYGYPEGKDTLRETIKFMYTDWADRDNPETRRKTLVALFTDHQWVEPSVVTADLHARYGSPTYFYAFYHHCQSLMKPAWSDAAHGDEVPYVFGVPMVGPTDLFPCNFSKNDVMLSAVVMTYWTNFAKTGDPNKPVPQDTKFIHTKANRFEEVAWSKYNPRDQLYLHIGLKPRVRDHYRATKVAFWKHLVPHLYNLHDMFHYTSTTTKVPPPDTTHSSHITRRPNGKTWSTKRPAISPAYSNENAQGSWNGDQDAGPLLVENPRDYSTELS

SEQ ID NO: 2774 - protein, 676 aa, synthetic construct
  REGION 1..676: note = NLGN4X (Q8N0W4) SP+PP+ECD
MSRPQGLLWLPLLFTPVCVMLNSNVLLWLTALAIKFTLIDSQAQYPVVNTNYGKIRGLRTPLPNEILGPVEQYLGVPYASPPTGERRFQPPEPPSSWTGIRNTTQFAAVCPQHLDERSLLHDMLPIWFTANLDTLMTYVQDQNEDCLYLNIYVPTEDDIHDQNSKKPVMVYIHGGSYMEGTGNMIDGSILASYGNVIVITINYRLGILGFLSTGDQAAKGNYGLLDQIQALRWIEENVGAFGGDPKRVTIFGSGAGASCVSLLTLSHYSEGLFQKAIIQSGTALSSWAVNYQPAKYTRILADKVGCNMLDTTDMVECLRNKNYKELIQQTITPATYHIAFGPVIDGDVIPDDPQILMEQGEFLNYDIMLGVNQGEGLKFVDGIVDNEDGVTPNDFDFSVSNFVDNLYGYPEGKDTLRETIKFMYTDWADKENPETRRKTLVALFTDHQWVAPAVATADLHAQYGSPTYFYAFYHHCQSEMKPSWADSAHGDEVPYVFGIPMIGPTELFSCNFSKNDVMLSAVVMTYWTNFAKTGDPNQPVPQDTKFIHTKPNRFEEVAWSKYNPKDQLYLHIGLKPRVRDHYRATKVAFWLELVPHLHNLNEIFQYVSTTTKVPPPDMTSFPYGTRRSPAKIWPTTKRPAITPANNPKHSKDPHKTGPEDTTVLIETKRDYSTELS

SEQ ID NO: 2775 - protein, 676 aa, synthetic construct
  REGION 1..676: note = NLGN4Y (Q8NFZ3) SP+PP+ECD
MLRPQGLLWLPLLFTSVCVMLNSNVLLWITALAIKFTLIDSQAQYPVVNTNYGKIQGLRTPLPSEILGPVEQYLGVPYASPPTGERRFQPPESPSSWTGIRNATQFSAVCPQHLDERFLLHDMLPIWFTTSLDTLMTYVQDQNEDCLYLNIYVPMEDDIHEQNSKKPVMVYIHGGSYMEGTGNMIDGSILASYGNVIVITINYRLGILGFLSTGDQAAKGNYGLLDQIQALRWIEENVGAFGGDPKRVTIFGSGAGASCVSLLTLSHYSEGLFQKAIIQSGTALSSWAVNYQPAKYTRILADKVGCNMLDTTDMVECLKNKNYKELIQQTITPATYHIAFGPVIDGDVIPDDPQILMEQGEFLNYDIMLGVNQGEGLKFVDGIVDNEDGVTPNDFDFSVSNFVDNLYGYPEGKDTLRETIKFMYTDWADKENPETRRKTLVALFTDHQWVAPAVATADLHAQYGSPTYFYAFYHHCQSEMKPSWADSAHGDEVPYVFGIPMIGPTELFSCNFSKNDVMLSAVVMTYWTNFAKTGDPNQPVPQDTKFIHTKPNRFEEVAWSKYNPKDQLYLHIGLKPRVRDHYRATKVAFWLELVPHLHNLNEIFQYVSTTTKVPPPDMTSFPYGTRRSPAKIWPTTKRPAITPANNPKHSKDPHKTGPEDTTVLIETKRDYSTELS

SEQ ID NO: 2776 - protein, 1735 aa, synthetic construct
  REGION 1..1735: note = NOTCH1 (P46531) SP+PP+ECD
MPPLLAPLLCLALLPALAARGPRCSQPGETCLNGGKCEAANGTEACVCGGAFVGPRCQDPNPCLSTPCKNAGTCHVVDRRGVADYACSCALGFSGPLCLTPLDNACLTNPCRNGGTCDLLTLTEYKCRCPPGWSGKSCQQADPCASNPCANGGQCLPFEASYICHCPPSFHGPTCRQDVNECGQKPGLCRHGGTCHNEVGSYRCVCRATHTGPNCERPYVPCSPSPCQNGGTCRPTGDVTHECACLPGFTGQNCEENIDDCPGNNCKNGGACVDGVNTYNCRCPPEWTGQYCTEDVDECQLMPNACQNGGTCHNTHGGYNCVCVNGWTGEDCSENIDDCASAACFHGATCHDRVASFYCECPHGRTGLLCHLNDACISNPCNEGSNCDTNPVNGKAICTCPSGYTGPACSQDVDECSLGANPCEHAGKCINTLGSFECQCLQGYTGPRCEIDVNECVSNPCQNDATCLDQIGEFQCICMPGYEGVHCEVNTDECASSPCLHNGRCLDKINEFQCECPTGFTGHLCQYDVDECASTPCKNGAKCLDGPNTYTCVCTEGYTGTHCEVDIDECDPDPCHYGSCKDGVATFTCLCRPGYTGHHCETNINECSSQPCRHGGTCQDRDNAYLCFCLKGTTGPNCEINLDDCASSPCDSGTCLDKIDGYECACEPGYTGSMCNINIDECAGNPCHNGGTCEDGINGFTCRCPEGYHDPTCLSEVNECNSNPCVHGACRDSLNGYKCDCDPGWSGTNCDINNNECESNPCVNGGTCKDMTSGYVCTCREGFSGPNCQTNINECASNPCLNQGTCIDDVAGYKCNCLLPYTGATCEVVLAPCAPSPCRNGGECRQSEDYESFSCVCPTGWQGQTCEVDINECVLSPCRHGASCQNTHGGYRCHCQAGYSGRNCETDIDDCRPNPCHNGGSCTDGINTAFCDCLPGFRGTFCEEDINECASDPCRNGANCTDCVDSYTCTCPAGFSGIHCENNTPDCTESSCFNGGTCVDGINSFTCLCPPGFTGSYCQHDVNECDSQPCLHGGTCQDGCGSYRCTCPQGYTGPNCQNLVHWCDSSPCKNGGKCWQTHTQYRCECPSGWTGLYCDVPSVSCEVAAQRQGVDVARLCQHGGLCVDAGNTHHCRCQAGYTGSYCEDLVDECSPSPCQNGATCTDYLGGYSCKCVAGYHGVNCSEEIDECLSHPCQNGGTCLDLPNTYKCSCPRGTQGVHCEINVDDCNPPVDPVSRSPKCFNNGTCVDQVGGYSCTCPPGFVGERCEGDVNECLSNPCDARGTQNCVQRVNDFHCECRAGHTGRRCESVINGCKGKPCKNGGTCAVASNTARGFICKCPAGFEGATCENDARTCGSLRCLNGGTCISGPRSPTCLCLGPFTGPECQFPASSPCLGGNPCYNQGTCEPTSESPFYRCLCPAKFNGLLCHILDYSFGGGAGRDIPPPLIEEACELPECQEDAGNKVCSLQCNNHACGWDGGDCSLNFNDPWKNCTQSLQCWKYFSDGHCDSQCNSAGCLFDGFDCQRAEGQCNPLYDQYCKDHFSDGHCDQGCNSAECEWDGLDCAEHVPERLAAGTLVVVVLMPPEQLRNSSFHFLRELSRVLHTNVVFKRDAHGQQMIFPYYGREEELRKHPIKRAAEGWAAPDALLGQVKASLLPGGSEGGRRRRELDPMDVRGSIVYLEIDNRQCVQASSQCFQSATDVAAFLGALASLGSLNIPYKIEAVQSETVEPPPPAQLH

SEQ ID NO: 2777 - protein, 1677 aa, synthetic construct
  REGION 1..1677: note = NOTCH2 (Q04721) SP+PP+ECD
MPALRPALLWALLALWLCCAAPAHALQCRDGYEPCVNEGMCVTYHNGTGYCKCPEGFLGEYCQHRDPCEKNRCQNGGTCVAQAMLGKATCRCASGFTGEDCQYSTSHPCFVSRPCLNGGTCHMLSRDTYECTCQVGFTGKECQWTDACLSHPCANGSTCTTVANQFSCKCLTGFTGQKCETDVNECDIPGHCQHGGTCLNLPGSYQCQCPQGFTGQYCDSLYVPCAPSPCVNGGTCRQTGDFTFECNCLPGFEGSTCERNIDDCPNHRCQNGGVCVDGVNTYNCRCPPQWTGQFCTEDVDECLLQPNACQNGGTCANRNGGYGCVCVNGWSGDDCSENIDDCAFASCTPGSTCIDRVASFSCMCPEGKAGLLCHLDDACISNPCHKGALCDTNPLNGQYICTCPQGYKGADCTEDVDECAMANSNPCEHAGKCVNTDGAFHCECLKGYAGPRCEMDINECHSDPCQNDATCLDKIGGFTCLCMPGFKGVHCELEINECQSNPCVNNGQCVDKVNRFQCLCPPGFTGPVCQIDIDDCSSTPCLNGAKCIDHPNGYECQCATGFTGVLCEENIDNCDPDPCHHGQCQDGIDSYTCICNPGYMGAICSDQIDECYSSPCLNDGRCIDLVNGYQCNCQPGTSGVNCEINFDDCASNPCIHGICMDGINRYSCVCSPGFTGQRCNIDIDECASNPCRKGATCINGVNGFRCICPEGPHHPSCYSQVNECLSNPCIHGNCTGGLSGYKCLCDAGWVGINCEVDKNECLSNPCQNGGTCDNLVNGYRCTCKKGFKGYNCQVNIDECASNPCLNQGTCFDDISGYTCHCVLPYTGKNCQTVLAPCSPNPCENAAVCKESPNFESYTCLCAPGWQGQRCTIDIDECISKPCMNHGLCHNTQGSYMCECPPGFSGMDCEEDIDDCLANPCQNGGSCMDGVNTFSCLCLPGFTGDKCQTDMNECLSEPCKNGGTCSDYVNSYTCKCQAGFDGVHCENNINECTESSCFNGGTCVDGINSFSCLCPVGFTGSFCLHEINECSSHPCLNEGTCVDGLGTYRCSCPLGYTGKNCQTLVNLCSRSPCKNKGTCVQKKAESQCLCPSGWAGAYCDVPNVSCDIAASRRGVLVEHLCQHSGVCINAGNTHYCQCPLGYTGSYCEEQLDECASNPCQHGATCSDFIGGYRCECVPGYQGVNCEYEVDECQNQPCQNGGTCIDLVNHFKCSCPPGTRGLLCEENIDDCARGPHCLNGGQCMDRIGGYSCRCLPGFAGERCEGDINECLSNPCSSEGSLDCIQLTNDYLCVCRSAFTGRHCETFVDVCPQMPCLNGGTCAVASNMPDGFICRCPPGFSGARCQSSCGQVKCRKGEQCVHTASGPRCFCPSPRDCESGCASSPCQHGGSCHPQRQPPYYSCQCAPPFSGSRCELYTAPPSTPPATCLSQYCADKARDGVCDEACNSHACQWDGGDCSLTMENPWANCSSPLPCWDYINNQCDELCNTVECLFDNFECQGNSKTCKYDKYCADHFKDNHCDQGCNSEECGWDGLDCAADQPENLAEGTLVIVVLMPPEQLLQDARSFLRALGTLLHTNLRIKRDSQGELMVYPYYGEKSAAMKKQRMTRRSLPGEQEQEVAGSKVFLEIDNRQCVQDSDHCFKNTDAAAALLASHAIQGTLSYPLVSVVSESLTPERTQ

SEQ ID NO: 2778 - protein, 1643 aa, synthetic construct
  REGION 1..1643: note = NOTCH3 (Q9UM47) SP+PP+ECD
MGPGARGRRRRRRPMSPPPPPPPVRALPLLLLLAGPGAAAPPCLDGSPCANGGRCTQLPSREAACLCPPGWVGERCQLEDPCHSGPCAGRGVCQSSVVAGTARFSCRCPRGFRGPDCSLPDPCLSSPCAHGARCSVGPDGRFLCSCPPGYQGRSCRSDVDECRVGEPCRHGGTCLNTPGSFRCQCPAGYTGPLCENPAVPCAPSPCRNGGTCRQSGDLTYDCACLPGFEGQNCEVNVDDCPGHRCLNGGTCVDGVNTYNCQCPPEWTGQFCTEDVDECQLQPNACHNGGTCFNTLGGHSCVCVNGWTGESCSQNIDDCATAVCFHGATCHDRVASFYCACPMGKTGLLCHLDDACVSNPCHEDAICDTNPVNGRAICTCPPGFTGGACDQDVDECSIGANPCEHLGRCVNTQGSFLCQCGRGYTGPRCETDVNECLSGPCRNQATCLDRIGQFTCICMAGFTGTYCEVDIDECQSSPCVNGGVCKDRVNGFSCTCPSGFSGSTCQLDVDECASTPCRNGAKCVDQPDGYECRCAEGFEGTLCDRNVDDCSPDPCHHGRCVDGIASFSCACAPGYTGTRCESQVDECRSQPCRHGGKCLDLVDKYLCRCPSGTTGVNCEVNIDDCASNPCTFGVCRDGINRYDCVCQPGFTGPLCNVEINECASSPCGEGGSCVDGENGFRCLCPPGSLPPLCLPPSHPCAHEPCSHGICYDAPGGFRCVCEPGWSGPRCSQSLARDACESQPCRAGGTCSSDGMGFHCTCPPGVQGRQCELLSPCTPNPCEHGGRCESAPGQLPVCSCPQGWQGPRCQQDVDECAGPAPCGPHGICTNLAGSFSCTCHGGYTGPSCDQDINDCDPNPCLNGGSCQDGVGSFSCSCLPGFAGPRCARDVDECLSNPCGPGTCTDHVASFTCTCPPGYGGFHCEQDLPDCSPSSCFNGGTCVDGVNSFSCLCRPGYTGAHCQHEADPCLSRPCLHGGVCSAAHPGFRCTCLESFTGPQCQTLVDWCSRQPCQNGGRCVQTGAYCLCPPGWSGRLCDIRSLPCREAAAQIGVRLEQLCQAGGQCVDEDSSHYCVCPEGRTGSHCEQEVDPCLAQPCQHGGTCRGYMGGYMCECLPGYNGDNCEDDVDECASQPCQHGGSCIDLVARYLCSCPPGTLGVLCEINEDDCGPGPPLDSGPRCLHNGTCVDLVGGFRCTCPPGYTGLRCEADINECRSGACHAAHTRDCLQDPGGGFRCLCHAGFSGPRCQTVLSPCESQPCQHGGQCRPSPGPGGGLTFTCHCAQPFWGPRCERVARSCRELQCPVGVPCQQTPRGPRCACPPGLSGPSCRSFPGSPPGASNASCAAAPCLHGGSCRPAPLAPFFRCACAQGWTGPRCEAPAAAPEVSEEPRCPRAACQAKRGDQRCDRECNSPGCGWDGGDCSLSVGDPWRQCEALQCWRLFNNSRCDPACSSPACLYDNFDCHAGGRERTCNPVYEKYCADHFADGRCDQGCNTEECGWDGLDCASEVPALLARGVLVLTVLLPPEELLRSSADFLQRLSAILRTSLRFRLDAHGQAMVFPYHRPSPGSEPRARRELAPEVIGSVVMLEIDNRLCLQSPENDHCFPDAQSAADYLGALSAVERLDFPYPLRDVRGEPLEPPEPSVPL

SEQ ID NO: 2779 - protein, 1447 aa, synthetic construct
  REGION 1..1447: note = NOTCH4 (Q99466) SP+PP+ECD
MQPPSLLLLLLLLLLLCVSVVRPRGLLCGSFPEPCANGGTCLSLSLGQGTCQCAPGFLGETCQFPDPCQNAQLCQNGGSCQALLPAPLGLPSSPSPLTPSFLCTCLPGFTGERCQAKLEDPCPPSFCSKRGRCHIQASGRPQCSCMPGWTGEQCQLRDFCSANPCVNGGVCLATYPQIQCHCPPGFEGHACERDVNECFQDPGPCPKGTSCHNTLGSFQCLCPVGQEGPRCELRAGPCPPRGCSNGGTCQLMPEKDSTFHLCLCPPGFIGPDCEVNPDNCVSHQCQNGGTCQDGLDTYTCLCPETWTGWDCSEDVDECETQGPPHCRNGGTCQNSAGSFHCVCVSGWGGTSCEENLDDCIAATCAPGSTCIDRVGSFSCLCPPGRTGLLCHLEDMCLSQPCHGDAQCSTNPLTGSTLCLCQPGYSGPTCHQDLDECLMAQQGPSPCEHGGSCLNTPGSFNCLCPPGYTGSRCEADHNECLSQPCHPGSTCLDLLATFHCLCPPGLEGQLCEVETNECASAPCLNHADCHDLLNGFQCICLPGFSGTRCEEDIDECRSSPCANGGQCQDQPGAFHCKCLPGFEGPRCQTEVDECLSDPCPVGASCLDLPGAFFCLCPSGFTGQLCEVPLCAPNLCQPKQICKDQKDKANCLCPDGSPGCAPPEDNCTCHHGHCQRSSCVCDVGWTGPECEAELGGCISAPCAHGGTCYPQPSGYNCTCPTGYTGPTCSEEMTACHSGPCLNGGSCNPSPGGYYCTCPPSHTGPQCQTSTDYCVSAPCFNGGTCVNRPGTFSCLCAMGFQGPRCEGKLRPSCADSPCRNRATCQDSPQGPRCLCPTGYTGGSCQTLMDLCAQKPCPRNSHCLQTGPSFHCLCLQGWTGPLCNLPLSSCQKAALSQGIDVSSLCHNGGLCVDSGPSYFCHCPPGFQGSLCQDHVNPCESRPCQNGATCMAQPSGYLCQCAPGYDGQNCSKELDACQSQPCHNHGTCTPKPGGFHCACPPGFVGLRCEGDVDECLDQPCHPTGTAACHSLANAFYCQCLPGHTGQWCEVEIDPCHSQPCFHGGTCEATAGSPLGFICHCPKGFEGPTCSHRAPSCGFHHCHHGGLCLPSPKPGFPPRCACLSGYGGPDCLTPPAPKGCGPPSPCLYNGSCSETTGLGGPGFRCSCPHSSPGPRCQKPGAKGCEGRSGDGACDAGCSGPGGNWDGGDCSLGVPDPWKGCPSHSRCWLLFRDGQCHPQCDSEECLFDGYDCETPPACTPAYDQYCHDHFHNGHCEKGCNTAECGWDGGDCRPEDGDPEWGPSLALLVVLSPPALDQQLFALARVLSLTLRVGLWVRKDRDGRDMVYPYPGARAEEKLGGTRDPTYQERAAPQTQPLGKETDSLSAGFVVVMGVDLSRCGPDHPASRCPWDPGLLLRFLAAMAAVGALEPLLPGPLLAVHPHAGTAPPANQLPW

SEQ ID NO: 2780 - protein, 1055 aa, synthetic construct
  REGION 1..1055: note = NPHS1 (O60500) SP+PP+ECD
MALGTTLRASLLLLGLLTEGLAQLAIPASVPRGFWALPENLTVVEGASVELRCGVSTPGSAVQWAKDGLLLGPDPRIPGFPRYRLEGDPARGEFHLHIEACDLSDDAEYECQVGRSEMGPELVSPRVILSILVPPKLLLLTPEAGTMVTWVAGQEYVVNCVSGDAKPAPDITILLSGQTISDISANVNEGSQQKLFTVEATARVTPRSSDNRQLLVCEASSPALEAPIKASFTVNVLFPPGPPVIEWPGLDEGHVRAGQSLELPCVARGGNPLATLQWLKNGQPVSTAWGTEHTQAVARSVLVMTVRPEDHGAQLSCEAHNSVSAGTQEHGITLQVTFPPSAIIILGSASQTENKNVTLSCVSKSSRPRVLLRWWLGWRQLLPMEETVMDGLHGGHISMSNLTFLARREDNGLTLTCEAFSEAFTKETFKKSLILNVKYPAQKLWIEGPPEGQKLRAGTRVRLVCLAIGGNPEPSLMWYKDSRTVTESRLPQESRRVHLGSVEKSGSTFSRELVLVTGPSDNQAKFTCKAGQLSASTQLAVQFPPTNVTILANASALRPGDALNLTCVSVSSNPPVNLSWDKEGERLEGVAAPPRRAPFKGSAAARSVLLQVSSRDHGQRVTCRAHSAELRETVSSFYRLNVLYRPEFLGEQVLVVTAVEQGEALLPVSVSANPAPEAFNWTFRGYRLSPAGGPRHRILSSGALHLWNVTRADDGLYQLHCQNSEGTAEARLRLDVHYAPTIRALQDPTEVNVGGSVDIVCTVDANPILPGMFNWERLGEDEEDQSLDDMEKISRGPTGRLRIHHAKLAQAGAYQCIVDNGVAPPARRLLRLVVRFAPQVEHPTPLTKVAAAGDSTSSATLHCRARGVPNIVFTWTKNGVPLDLQDPRYTEHTYHQGGVHSSLLTIANVSAAQDYALFTCTATNALGSDQTNIQLVSISRPDPPSGLKVVSLTPHSVGLEWKPGFDGGLPQRFCIRYEALGTPGFHYVDVVPPQATTFTLTGLQPSTRYRVWLLASNALGDSGLADKGTQLPITTPGLHQPSGEPEDQLPTEPPS

SEQ ID NO: 2781 - protein, 473 aa, synthetic construct
  REGION 1..473: note = NPR1 (P16066) SP+PP+ECD
MPGPRRPAGSRLRLLLLLLLPPLLLLLRGSHAGNLTVAVVLPLANTSYPWSWARVGPAVELALAQVKARPDLLPGWTVRTVLGSSENALGVCSDTAAPLAAVDLKWEHNPAVFLGPGCVYAAAPVGRFTAHWRVPLLTAGAPALGFGVKDEYALTTRAGPSYAKLGDFVAALHRRLGWERQALMLYAYRPGDEEHCFFLVEGLFMRVRDRLNITVDHLEFAEDDLSHYTRLLRTMPRKGRVIYICSSPDAFRTLMLLALEAGLCGEDYVFFHLDIFGQSLQGGQGPAPRRPWERGDGQDVSARQAFQAAKIITYKDPDNPEYLEFLKQLKHLAYEQFNFTMEDGLVNTIPASFHDGLLLYIQAVTETLAHGGTVTDGENITQRMWNRSFQGVTGYLKIDSSGDRETDFSLWDMDPENGAFRVVLNYNGTSQELVAVSGRKLNWPLGYPPPDIPKCGFDNEDPACNQDHLSTLE

SEQ ID NO: 2782 - protein, 458 aa, synthetic construct
  REGION 1..458: note = NPR2 (P20594) SP+PP+ECD
MALPSLLLLVAALAGGVRPPGARNLTLAVVLPEHNLSYAWAWPRVGPAVALAVEALGRALPVDLRFVSSELEGACSEYLAPLSAVDLKLYHDPDLLLGPGCVYPAASVARFASHWRLPLLTAGAVASGFSAKNDHYRTLVRTGPSAPKLGEFVVTLHGHFNWTARAALLYLDARTDDRPHYFTIEGVFEALQGSNLSVQHQVYAREPGGPEQATHFIRANGRIVYICGPLEMLHEILLQAQRENLTNGDYVFFYLDVFGESLRAGPTRATGRPWQDNRTREQAQALREAFQTVLVITYREPPNPEYQEFQNRLLIRAREDFGVELGPSLMNLIAGCFYDGILLYAEVLNETIQEGGTREDGLRIVEKMQGRRYHGVTGLVVMDKNNDRETDFVLWAMGDLDSGDFQPAAHYSGAEKQIWWTGRPIPWVKGAPPSDNPPCAFDLDDPSCDKTPLSTLAI

SEQ ID NO: 2783 - protein, 481 aa, synthetic construct
  REGION 1..481: note = NPR3 (P17342) SP+PP+ECD
MPSLLVLTFSPCVLLGWALLAGGTGGGGVGGGGGGAGIGGGRQEREALPPQKIEVLVLLPQDDSYLFSLTRVRPAIEYALRSVEGNGTGRRLLPPGTRFQVAYEDSDCGNRALFSLVDRVAAARGAKPDLILGPVCEYAAAPVARLASHWDLPMLSAGALAAGFQHKDSEYSHLTRVAPAYAKMGEMMLALFRHHHWSRAALVYSDDKLERNCYFTLEGVHEVFQEEGLHTSIYSFDETKDLDLEDIVRNIQASERVVIMCASSDTIRSIMLVAHRHGMTSGDYAFFNIELFNSSSYGDGSWKRGDKHDFEAKQAYSSLQTVTLLRTVKPEFEKFSMEVKSSVEKQGLNMEDYVNMFVEGFHDAILLYVLALHEVLRAGYSKKDGGKIIQQTWNRTFEGIAGQVSIDANGDRYGDFSVIAMTDVEAGTQEVIGDYFGKEGRFEMRPNVKYPWGPLKLRIDENRIVEHTNSSPCKSSGGLEE

SEQ ID NO: 2784 - protein, 339 aa, synthetic construct
  REGION 1..339: note = NPTN (Q9Y639) SP+PP+ECD
MSGSSLPSALALSLLLVSGSLLPGPGAAQNAGFVKSPMSETKLTGDAFELYCDVVGSPTPEIQWWYAEVNRAESFRQLWDGARKRRVTVNTAYGSNGVSVLRITRLTLEDSGTYECRASNDPKRNDLRQNPSITWIRAQATISVLQKPRIVTSEEVIIRDSPVLPVTLQCNLTSSSHTLTYSYWTKNGVELSATRKNASNMEYRINKPRAEDSGEYHCVYHFVSAPKANATIEVKAAPDITGHKRSENKNEGQDATMYCKSVGYPHPDWIWRKKENGMPMDIVNTSGRFFIINKENYTELNIVNLQITEDPGEYECNATNAIGSASVVTVLRVRSHLAP

SEQ ID NO: 2785 - protein, 1167 aa, synthetic construct
  REGION 1..1167: note = NRCAM (Q92823) SP+PP+ECD
MQLKIMPKKKRLSAGRVPLILFLCQMISALEVPLDPKLLEDLVQPPTITQQSPKDYIIDPRENIVIQCEAKGKPPPSFSWTRNGTHFDIDKDPLVTMKPGTGTLIINIMSEGKAETYEGVYQCTARNERGAAVSNNIVVRPSRSPLWTKEKLEPITLQSGQSLVLPCRPPIGLPPPIIFWMDNSFQRLPQSERVSQGLNGDLYFSNVLPEDTREDYICYARFNHTQTIQQKQPISVKVISVDELNDTIAANLSDTEFYGAKSSRERPPTFLTPEGNASNKEELRGNVLSLECIAEGLPTPIIYWAKEDGMLPKNRTVYKNFEKTLQIIHVSEADSGNYQCIAKNALGAIHHTISVRVKAAPYWITAPQNLVLSPGEDGTLICRANGNPKPRISWLTNGVPIEIAPDDPSRKIDGDTIIFSNVQERSSAVYQCNASNEYGYLLANAFVNVLAEPPRILTPANTLYQVIANRPALLDCAFFGSPLPTIEWFKGAKGSALHEDIYVLHENGTLEIPVAQKDSTGTYTCVARNKLGMAKNEVHLEIKDPTWIVKQPEYAVVQRGSMVSFECKVKHDHTLSLTVLWLKDNRELPSDERFTVDKDHLVVADVSDDDSGTYTCVANTTLDSVSASAVLSVVAPTPTPAPVYDVPNPPFDLELTDQLDKSVQLSWTPGDDNNSPITKFIIEYEDAMHKPGLWHHQTEVSGTQTTAQLKLSPYVNYSFRVMAVNSIGKSLPSEASEQYLTKASEPDKNPTAVEGLGSEPDNLVITWKPLNGFESNGPGLQYKVSWRQKDGDDEWTSVVVANVSKYIVSGTPTFVPYLIKVQALNDMGFAPEPAVVMGHSGEDLPMVAPGNVRVNVVNSTLAEVHWDPVPLKSIRGHLQGYRIYYWKTQSSSKRNRRHIEKKILTFQGSKTHGMLPGLEPFSHYTLNVRVVNGKGEGPASPDRVFNTPEGVPSAPSSLKIVNPTLDSLTLEWDPPSHPNGILTEYTLKYQPINSTHELGPLVDLKIPANKTRWTLKNLNFSTRYKFYFYAQTSAGSGSQITEEAVTTVDEAGILPPDVGAGKVQAVNPRISNLTAAAAETYANISWEYEGPEHVNFYVEYGVAGSKEEWRKEIVNGSRSFFGLKGLMPGTAYKVRVGAVGDSGFVSSEDVFETGPAMASRQVDIATQ

SEQ ID NO: 2786 - protein, 856 aa, synthetic construct
  REGION 1..856: note = NRP1 (O14786) SP+PP+ECD
MERGLPLLCAVLALVLAPAGAFRNDKCGDTIKIESPGYLTSPGYPHSYHPSEKCEWLIQAPDPYQRIMINFNPHFDLEDRDCKYDYVEVFDGENENGHFRGKFCGKIAPPPVVSSGPFLFIKFVSDYETHGAGFSIRYEIFKRGPECSQNYTTPSGVIKSPGFPEKYPNSLECTYIVFVPKMSEIILEFESFDLEPDSNPPGGMFCRYDRLEIWDGFPDVGPHIGRYCGQKTPGRIRSSSGILSMVFYTDSAIAKEGFSANYSVLQSSVSEDFKCMEALGMESGEIHSDQITASSQYSTNWSAERSRLNYPENGWTPGEDSYREWIQVDLGLLRFVTAVGTQGAISKETKKKYYVKTYKIDVSSNGEDWITIKEGNKPVLFQGNTNPTDVVVAVFPKPLITRFVRIKPATWETGISMRFEVYGCKITDYPCSGMLGMVSGLISDSQITSSNQGDRNWMPENIRLVTSRSGWALPPAPHSYINEWLQIDLGEEKIVRGIIIQGGKHRENKVFMRKFKIGYSNNGSDWKMIMDDSKRKAKSFEGNNNYDTPELRTFPALSTRFIRIYPERATHGGLGLRMELLGCEVEAPTAGPTTPNGNLVDECDDDQANCHSGTGDDFQLTGGTTVLATEKPTVIDSTIQSEFPTYGFNCEFGWGSHKTFCHWEHDNHVQLKWSVLTSKTGPIQDHTGDGNFIYSQADENQKGKVARLVSPVVYSQNSAHCMTFWYHMSGSHVGTLRVKLRYQKPEEYDQLVWMAIGHQGDHWKEGRVLLHKSLKLYQVIFEGEIGKGNLGGIAVDDISINNHISQEDCAKPADLDKKNPEIKIDETGSTPGYEGEGEGDKNISRKPGNVLKTLDP

SEQ ID NO: 2787 - protein, 864 aa, synthetic construct
  REGION 1..864: note = NRP2 (O60462) SP+PP+ECD
MDMFPLTWVFLALYFSRHQVRGQPDPPCGGRLNSKDAGYITSPGYPQDYPSHQNCEWIVYAPEPNQKIVLNFNPHFEIEKHDCKYDFIEIRDGDSESADLLGKHCGNIAPPTIISSGSMLYIKFTSDYARQGAGFSLRYEIFKTGSEDCSKNFTSPNGTIESPGFPEKYPHNLDCTFTILAKPKMEIILQFLIFDLEHDPLQVGEGDCKYDWLDIWDGIPHVGPLIGKYCGTKTPSELRSSTGILSLTFHTDMAVAKDGFSARYYLVHQEPLENFQCNVPLGMESGRIANEQISASSTYSDGRWTPQQSRLHGDDNGWTPNLDSNKEYLQVDLRFLTMLTAIATQGAISRETQNGYYVKSYKLEVSTNGEDWMVYRHGKNHKVFQANNDATEVVLNKLHAPLLTRFVRIRPQTWHSGIALRLELFGCRVTDAPCSNMLGMLSGLIADSQISASSTQEYLWSPSAARLVSSRSGWFPRIPQAQPGEEWLQVDLGTPKTVKGVIIQGARGGDSITAVEARAFVRKFKVSYSLNGKDWEYIQDPRTQQPKLFEGNMHYDTPDIRRFDPIPAQYVRVYPERWSPAGIGMRLEVLGCDWTDSKPTVETLGPTVKSEETTTPYPTEEEATECGENCSFEDDKDLQLPSGFNCNFDFLEEPCGWMYDHAKWLRTTWASSSSPNDRTFPDDRNFLRLQSDSQREGQYARLISPPVHLPRSPVCMEFQYQATGGRGVALQVVREASQESKLLWVIREDQGGEWKHGRIILPSYDMEYQIVFEGVIGKGRSGEIAIDDIRISTDVPLENCMEPISAFAGENFKVDIPEIHEREGYEDEIDDEYEVDWSNSSSATSGSGAPSTDKEKSWLYTLDP

SEQ ID NO: 2788 - protein, 650 aa, synthetic construct
  REGION 1..650: note = NRROS (Q86YC3) SP+PP+ECD
MELLPLWLCLGFHFLTVGWRNRSGTATAASQGVCKLVGGAADCRGQSLASVPSSLPPHARMLTLDANPLKTLWNHSLQPYPLLESLSLHSCHLERISRGAFQEQGHLRSLVLGDNCLSENYEETAAALHALPGLRRLDLSGNALTEDMAALMLQNLSSLRSVSLAGNTIMRLDDSVFEGLERLRELDLQRNYIFEIEGGAFDGLAELRHLNLAFNNLPCIVDFGLTRLRVLNVSYNVLEWFLATGGEAAFELETLDLSHNQLLFFPLLPQYSKLRTLLLRDNNMGFYRDLYNTSSPREMVAQFLLVDGNVTNITTVSLWEEFSSSDLADLRFLDMSQNQFQYLPDGFLRKMPSLSHLNLHQNCLMTLHIREHEPPGALTELDLSHNQLSELHLAPGLASCLGSLRLFNLSSNQLLGVPPGLFANARNITTLDMSHNQISLCPLPAASDRVGPPSCVDFRNMASLRSLSLEGCGLGALPDCPFQGTSLTYLDLSSNWGVLNGSLAPLQDVAPMLQVLSLRNMGLHSSFMALDFSGFGNLRDLDLSGNCLTTFPRFGGSLALETLDLRRNSLTALPQKAVSEQLSRGLRTIYLSQNPYDCCGVDGWGALQHGQTVADWAMVTCNLSSKIIRVTELPGGVPRDCKWERLDLGL

SEQ ID NO: 2789 - protein, 396 aa, synthetic construct
  REGION 1..396: note = NRXN1 (P58400) SP+PP+ECD
MYQRMLRCGAELGSPGGGGGGGGGGGAGGRLALLWIVPLTLSGLLGVAWGASSLGAHHIHHFHGSSKHHSVPIAIYRSPASLRGGHAGTTYIFSKGGGQITYKWPPNDRPSTRADRLAIGFSTVQKEAVLVRVDSSSGLGDYLELHIHQGKIGVKFNVGTDDIAIEESNAIINDGKYHVVRFTRSGGNATLQVDSWPVIERYPAGNNDNERLAIARQRIPYRLGRVVDEWLLDKGRQLTIFNSQATIIIGGKEQGQPFQGQLSGLYYNGLKVLNMAAENDANIAIVGNVRLVGEVPSSMTTESTATAMQSEMSTSIMETTTTLATSTARRGKPPTKEPISQTTDDILVASAECPSDDEDIDPCEPSSGGLANPTRAGGREPYPGSAEVIRESSSTT

SEQ ID NO: 2790 - protein, 396 aa, synthetic construct; identical to SEQ ID NO: 2789
  REGION 1..396: note = NRXN1 (Q9ULB1) SP+PP+ECD

SEQ ID NO: 2791 - protein, 590 aa, synthetic construct
  REGION 1..590: note = NRXN2 (P58401) SP+PP+ECD
MPPGGSGPGGCPRRPPALAGPLPPPPPPPPPPLLPLLPLLLLLLLGAAEGARVSSSLSTTHHVHHFHSKHGTVPIAINRMPFLTRGGHAGTTYIFGKGGALITYTWPPNDRPSTRMDRLAVGFSTHQRSAVLVRVDSASGLGDYLQLHIDQGTVGVIFNVGTDDITIDEPNAIVSDGKYHVVRFTRSGGNATLQVDSWPVNERYPAGNFDNERLAIARQRIPYRLGRVVDEWLLDKGRQLTIFNSQAAIKIGGRDQGRPFQGQVSGLYYNGLKVLALAAESDPNVRTEGHLRLVGEGPSVLLSAETTATTLLADMATTIMETTTTMATTTTRRGRSPTLRDSTTQNTDDLLVASAECPSDDEDLEECEPSTGGELILPIITEDSLDPPPVATRSPFVPPPPTFYPFLTGVGATQDTLPPPAARRPPSGGPCQAERDDSDCEEPIEASGFASGEVFDSSLPPTDDEDFYTTFPLVTDRTTLLSPRKPAPRPNLRTDGATGAPGVLFAPSAPAPNLPAGKMNHRDPLQPLLENPPLGPGAPTSFEPRRPPPLRPGVTSAPGFPHLPTANPTGPGERGPPGAVEVIRESSSTT

SEQ ID NO: 2792 - protein, 590 aa, synthetic construct; identical to SEQ ID NO: 2791
  REGION 1..590: note = NRXN2 (Q9P2S2) SP+PP+ECD

SEQ ID NO: 2793 - protein, 562 aa, synthetic construct
  REGION 1..562: note = NRXN3 (Q9HDB5) SP+PP+ECD
MHLRIHARRSPPRRPAWTLGIWFLFWGCIVSSVWSSSNVASSSSTSSSPGSHSQHEHHFHGSKHHSVPISIYRSPVSLRGGHAGATYIFGKSGGLILYTWPANDRPSTRSDRLAVGFSTTVKDGILVRIDSAPGLGDFLQLHIEQGKIGVVFNIGTVDISIKEERTPVNDGKYHVVRFTRNGGNATLQVDNWPVNEHYPTGRQLTIFNTQAQIAIGGKDKGRLFQGQLSGLYYDGLKVLNMAAENNPNIKINGSVRLVGEVPSILGTTQTTSMPPEMSTTVMETTTTMATTTTRKNRSTASIQPTSDDLVSSAECSSDDEDFVECEPSTGGELVIPLLVEDPLATPPIATRAPSITLPPTFRPLLTIIETTKDSLSMTSEAGLPCLSDQGSDGCDDDGLVISGYGSGETFDSNLPPTDDEDFYTTFSLVTDKSLSTSIFEGGYKAHAPKWESKDFRPNKVSETSRTTTTSLSPELIRFTASSSSGMVPKLPAGKMNNRDLKPQPDIVLLPLPTAYELDSTKLKSPLITSPMFRNVPTANPTEPGIRRVPGASEVIRESSSTT

SEQ ID NO: 2794 - protein, 562 aa, synthetic construct; identical to SEQ ID NO: 2793
  REGION 1..562: note = NRXN3 (Q9Y4C0) SP+PP+ECD

SEQ ID NO: 2795 - protein, 423 aa, synthetic construct
  REGION 1..423: note = NTRK1 (P04629) SP+PP+ECD
MLRGGRRGQLGWHSWAAGPGSLLAWLILASAGAAPCPDACCPHGSSGLRCTRDGALDSLHHLPGAENLTELYIENQQHLQHLELRDLRGLGELRNLTIVKSGLRFVAPDAFHFTPRLSRLNLSFNALESLSWKTVQGLSLQELVLSGNPLHCSCALRWLQRWEEEGLGGVPEQKLQCHGQGPLAHMPNASCGVPTLKVQVPNASVDVGDDVLLRCQVEGRGLEQAGWILTELEQSATVMKSGGLPSLGLTLANVTSDLNRKNVTCWAENDVGRAEVSVQVNVSFPASVQLHTAVEMHHWCIPFSVDGQPAPSLRWLFNGSVLNETSFIFTEFLEPAANETVRHGCLRLNQPTHVNNGNYTLLAANPFGQASASIMAAFMDNPFEFNPEDPIPVSFSPVDTNSTSGDPVEKKDETPFGVSVAVG

SEQ ID NO: 2796 - protein, 430 aa, synthetic construct
  REGION 1..430: note = NTRK2 (Q16620) SP+PP+ECD
MSSWIRWHGPAMARLWGFCWLVVGFWRAAFACPTSCKCSASRIWCSDPSPGIVAFPRLEPNSVDPENITEIFIANQKRLEIINEDDVEAYVGLRNLTIVDSGLKFVAHKAFLKNSNLQHINFTRNKLTSLSRKHFRHLDLSELILVGNPFTCSCDIMWIKTLQEAKSSPDTQDLYCLNESSKNIPLANLQIPNCGLPSANLAAPNLTVEEGKSITLSCSVAGDPVPNMYWDVGNLVSKHMNETSHTQGSLRITNISSDDSGKQISCVAENLVGEDQDSVNLTVHFAPTITFLESPTSDHHWCIPFTVKGNPKPALQWFYNGAILNESKYICTKIHVTNHTEYHGCLQLDNPTHMNNGDYTLIAKNEYGKDEKQISAHFMGWPGIDDGANPNYPDVIYEDYGTAANDIGDTTNRSNEIPSTDVTDKTGREH

SEQ ID NO: 2797 - protein, 429 aa, synthetic construct
  REGION 1..429: note = NTRK3 (Q16288) SP+PP+ECD
MDVSLCPAKCSFWRIFLLGSVWLDYVGSVLACPANCVCSKTEINCRRPDDGNLFPLLEGQDSGNSNGNASINITDISRNITSIHIENWRSLHTLNAVDMELYTGLQKLTIKNSGLRSIQPRAFAKNPHLRYINLSSNRLTTLSWQLFQTLSLRELQLEQNFFNCSCDIRWMQLWQEQGEAKLNSQNLYCINADGSQLPLFRMNISQCDLPEISVSHVNLTVREGDNAVITCNGSGSPLPDVDWIVTGLQSINTHQTNLNWTNVHAINLTLVNVTSEDNGFTLTCIAENVVGMSNASVALTVYYPPRVVSLEEPELRLEHCIEFVVRGNPPPTLHWLHNGQPLRESKIIHVEYYQEGEISEGCLLFNKPTHYNNGNYTLIAKNPLGTANQTINGHFLKEPFPESTDNFILFDEVSPTPPITVTHKPEEDT

SEQ ID NO: 2798 - protein, 1808 aa, synthetic construct
  REGION 1..1808: note = NUP210 (Q8TEM1) SP+PP+ECD
MAARGRGLLLLTLSVLLAAGPSAAAAKLNIPKVLLPFTRATRVNFTLEASEGCYRWLSTRPEVASIEPLGLDEQQCSQKAVVQARLTQPARLTSIIFAEDITTGQVLRCDAIVDLIHDIQIVSTTRELYLEDSPLELKIQALDSEGNTFSTLAGLVFEWTIVKDSEADRFSDSHNALRILTFLESTYIPPSYISEMEKAAKQGDTILVSGMKTGSSKLKARIQEAVYKNVRPAEVRLLILENILLNPAYDVYLMVGTSIHYKVQKIRQGKITELSMPSDQYELQLQNSIPGPEGDPARPVAVLAQDTSMVTALQLGQSSLVLGHRSIRMQGASRLPNSTIYVVEPGYLGFTVHPGDRWVLETGRLYEITIEVFDKFSNKVYVSDNIRIETVLPAEFFEVLSSSQNGSYHRIRALKRGQTAIDAALTSVVDQDGGVHILQVPVWNQQEVEIHIPITLYPSILTFPWQPKTGAYQYTIRAHGGSGNFSWSSSSHLVATVTVKGVMTTGSDIGFSVIQAHDVQNPLHFGEMKVYVIEPHSMEFAPCQVEARVGQALELPLRISGLMPGGASEVVTLSDCSHFDLAVEVENQGVFQPLPGRLPPGSEHCSGIRVKAEAQGSTTLLVSYRHGHVHLSAKITIAAYLPLKAVDPSSVALVTLGSSKEMLFEGGPRPWILEPSKFFQNVTAEDTDSIGLALFAPHSSRNYQQHWILVTCQALGEQVIALSVGNKPSLTNPFPAVEPAVVKFVCAPPSRLTLAPVYTSPQLDMSCPLLQQNKQVVPVSSHRNPRLDLAAYDQEGRRFDNFSSLSIQWESTRPVLASIEPELPMQLVSQDDESGQKKLHGLQAILVHEASGTTAITATATGYQESHLSSARTKQPHDPLVPLSASIELILVEDVRVSPEEVTIYNHPGIQAELRIREGSGYFFLNTSTADVVKVAYQEARGVAMVHPLLPGSSTIMIHDLCLVFPAPAKAVVYVSDIQELYIRVVDKVEIGKTVKAYVRVLDLHKKPFLAKYFPFMDLKLRAASPIITLVALDEALDNYTITFLIRGVAIGQTSLTASVTNKAGQRINSAPQQIEVFPPFRLMPRKVTLLIGATMQVTSEGGPQPQSNILFSISNESVALVSAAGLVQGLAIGNGTVSGLVQAVDAETGKVVIISQDLVQVEVLLLRAVRIRAPIMRMRTGTQMPIYVTGITNHQNPFSFGNAVPGLTFHWSVTKRDVLDLRGRHHEASIRLPSQYNFAMNVLGRVKGRTGLRVVVKAVDPTSGQLYGLARELSDEIQVQVFEKLQLLNPEIEAEQILMSPNSYIKLQTNRDGAASLSYRVLDGPEKVPVVHVDEKGFLASGSMIGTSTIEVIAQEPFGANQTIIVAVKVSPVSYLRVSMSPVLHTQNKEALVAVPLGMTVTFTVHFHDNSGDVFHAHSSVLNFATNRDDFVQIGKGPTNNTCVVRTVSVGLTLLRVWDAEHPGLSDFMPLPVLQAISPELSGAMVVGDVLCLATVLTSLEGLSGTWSSSANSILHIDPKTGVAVARAVGSVTVYYEVAGHLRTYKEVVVSVPQRIMARHLHPIQTSFQEATASKVIVAVGDRSSNLRGECTPTQREVIQALHPETLISCQSQFKPAVFDFPSQDVFTVEPQFDTALGQYFCSITMHRLTDKQRKHLSMKKTALVVSASLSSSHFSTEQVGAEVPFSPGLFADQAEILLSNHYTSSEIRVFGAPEVLENLEVKSGSPAVLAFAKEKSFGWPSFITYTVGVLDPAAGSQGPLSTTLTFSSPVTNQAIAIPVTVAFVVDRRGPGPYGASLFQHFLDSYQ

SEQ ID NO: 2799 - protein, 1812 aa, synthetic construct
  REGION 1..1812: note = NUP210L (Q5VU65) SP+PP+ECD
MTGCPASSRRRGFGLFFFLRLHRLLLLFLVLRGTLANKLNVPQVLLPFGREPGRVPFLLEAQRGCYTWHSTHHDAVTVEPLYENGTLCSQKAVLIAESTQPIRLSSIILAREIVTDHELRCDVKVDVINSIEIVSRARELYVDDSPLELMVRALDAEGNTFSSLAGMMFEWSIAQDNESAREELSSKIRILKYSEAEYAPPIYIAEMEKEEKQGDVILVSGIRTGAAVVKVRIHEPFYKKVAAALIRLLVLENIFLIPSHDIYLLVGTYIKYQVAKMVQGRVTEVKFPLEHYILELQDHRVALNGSHSEKVAILDDKTAMVTASQLGQTNLVFVHKNVHMRSVSGLPNCTIYVVEPGFLGFTVQPGNRWSLEVGQVYVITVDVFDKSSTKVYISDNLRITYDFPKEYFEEQLTTVNGSYHIVKALKDGVVVINASLTSIIYQNKDIQPIKFLIKHQQEVKIYFPIMLTPKFLAFPHHPMGMLYRYKVQVEGGSGNFTWTSSNETVVIVTTKGVVTAGQVRGNSTVLARDVQNPFRYGEIKIHVLKLNKMELLPFHADVEIGQIIEIPIAMYHINKETKEAMAFTDCSHLSLDLNMDKQGVFTLLKEGIQRPGPMHCSSTHIAAKSLGHTLVTVSVNECDKYLESSATFAAYEPLKALNPVEVALVTWQSVKEMVFEGGPRPWILEPSRFFLELNAEKTEKIGIAQVWLPSKRKQNQYIYRIQCLDLGEQVLTFRIGNHPGVLNPSPAVEVLQVRFICAHPASMSVTPVYKVPAGAQPCPLPQHNKWLIPVSRLRDTVLELAVFDQHRRKFDNFSSLMLEWKSSNETLAHFEDYKSVEMVAKDDGSGQTRLHGHQILKVHQIKGTVLIGVNFVGYSEKKSPKEISNLPRSVDVELLLVDDVTVVPENATIYNHPDVKETFSLVEGSGYFLVNSSEQGVVTITYMEAESSVELVPLHPGFFTLEVYDLCLAFLGPATAHLRVSDIQELELDLIDKVEIDKTVLVTVRVLGSSKRPFQNKYFRNMELKLQLASAIVTLTPMEQQDEYSENYILRATTIGQTTLVAIAKDKMGRKYTSTPRHIEVFPPFRLLPEKMTLIPMNMMQVMSEGGPQPQSIVHFSISNQTVAVVNRRGQVTGKIVGTAVVHGTIQTVNEDTGKVIVFSQDEVQIEVVQLRAVRILAAATRLITATKMPVYVMGVTSTQTPFSFSNANPGLTFHWSMSKRDVLDLVPRHSEVFLQLPVEHNFAMVVHTKAAGRTSIKVTVHCMNSSSGQFEGNLLELSDEVQILVFEKLQLFYPECQPEQILMPINSQLKLHTNREGAAFVSSRVLKCFPNSSVIEEDGEGLLKAGSIAGTAVLEVTSIEPFGVNQTTITGVQVAPVTYLRVSSQPKLYTAQGRTLSAFPLGMSLTFTVQFYNSIGEKFHTHNTQLYLALNRDDLLHIGPGNKNYTYMAQAVNRGLTLVGLWDRRHPGMADYIPVAVEHAIEPDTKLTFVGDIICFSTHLVSQHGEPGIWMISANNILQTDIVTGVGVARSPGTAMIFHDIPGVVKTYREVVVNASSRLMLSYDLKTYLTNTLNSTVFKLFITTGRNGVNLKGFCTPNQALAITKVLLPATLMLCHVQFSNTLLDIPASKVFQVHSDFSMEKGVYVCIIKVRPQSEELLQALSVADTSVYGWATLVSERSKNGMQRILIPFIPAFYINQSELVLSHKQDIGEIRVLGVDRVLRKLEVISSSPVLVVAGHSHSPLTPGLAIYSVRVVNFTSFQQMASPVFINISCVLTSQSEAVVVRAMKDKLGADHCEDSAILKRFTGSYQ

SEQ ID NO: 2800 - protein, 740 aa, synthetic construct
  REGION 1..740: note = OSMR (Q99650) SP+PP+ECD
MALFAVFQTTFFLTLLSLRTYQSEVLAERLPLTPVSLKVSTNSTRQSLHLQWTVHNLPYHQELKMVFQIQISRIETSNVIWVGNYSTTVKWNQVLHWSWESELPLECATHFVRIKSLVDDAKFPEPNFWSNWSSWEEVSVQDSTGQDILFVFPKDKLVEEGTNVTICYVSRNIQNNVSCYLEGKQIHGEQLDPHVTAFNLNSVPFIRNKGTNIYCEASQGNVSEGMKGIVLFVSKVLEEPKDFSCETEDFKTLHCTWDPGTDTALGWSKQPSQSYTLFESFSGEKKLCTHKNWCNWQITQDSQETYNFTLIAENYLRKRSVNILFNLTHRVYLMNPFSVNFENVNATNAIMTWKVHSIRNNFTYLCQIELHGEGKMMQYNVSIKVNGEYFLSELEPATEYMARVRCADASHFWKWSEWSGQNFTTLEAAPSEAPDVWRIVSLEPGNHTVTLFWKPLSKLHANGKILFYNVVVENLDKPSSSELHSIPAPANSTKLILDRCSYQICVIANNSVGASPASVIVISADPENKEVEEERIAGTEGGFSLSWKPQPGDVIGYVVDWCDHTQDVLGDFQWKNVGPNTTSTVISTDAFRPGVRYDFRIYGLSTKRIACLLEKKTGYSQELAPSDNPHVLVDTLTSHSFTLSWKDYSTESQPGFIQGYHVYLKSKARQCHPRFEKAVLSDGSECCKYKIDNPEEKALIVDNLKPESFYEFFITPFTSAGEGPSATFTKVTTPDEHSSM

SEQ ID NO: 2801 - protein, 284 aa, synthetic construct
  REGION 1..284: note = OSTM1 (Q86WC4) SP+PP+ECD
MEPGPTAAQRRCSLPPWLPLGLLLWSGLALGALPFGSSPHRVFHDLLSEQQLLEVEDLSLSLLQGGGLGPLSLPPDLPDLDPECRELLLDFANSSAELTGCLVRSARPVRLCQTCYPLFQQVVSKMDNISRAAGNTSESQSCARSLLMADRMQIVVILSEFFNTTWQEANCANCLTNNSEELSNSTVYFLNLFNHTLTCFEHNLQGNAHSLLQTKNYSEVCKNCREAYKTLSSLYSEMQKMNELENKAEPGTHLCIDVEDAMNITRKLWSRTFNCSVPCSDTVP

SEQ ID NO: 2802 - protein, 863 aa, synthetic construct
  REGION 1..863: note = PAM (P19021) SP+PP+ECD
MAGRVPSLLVLLVFPSSCLAFRSPLSVFKRFKETTRPFSNECLGTTRPVVPIDSSDFALDIRMPGVTPKQSDTYFCMSMRIPVDEEAFVIDFKPRASMDTVHHMLLFGCNMPSSTGSYWFCDEGTCTDKANILYAWARNAPPTRLPKGVGFRVGGETGSKYFVLQVHYGDISAFRDNNKDCSGVSLHLTRLPQPLIAGMYLMMSVDTVIPAGEKVVNSDISCHYKNYPMHVFAYRVHTHHLGKVVSGYRVRNGQWTLIGRQSPQLPQAFYPVGHPVDVSFGDLLAARCVFTGEGRTEATHIGGTSSDEMCNLYIMYYMEAKHAVSFMTCTQNVAPDMFRTIPPEANIPIPVKSDMVMMHEHHKETEYKDKIPLLQQPKREEEEVLDQGDFYSLLSKLLGEREDVVHVHKYNPTEKAESESDLVAEIANVVQKKDLGRSDAREGAEHERGNAILVRDRIHKFHRLVSTLRPPESRVFSLQQPPPGEGTWEPEHTGDFHMEEALDWPGVYLLPGQVSGVALDPKNNLVIFHRGDHVWDGNSFDSKFVYQQIGLGPIEEDTILVIDPNNAAVLQSSGKNLFYLPHGLSIDKDGNYWVTDVALHQVFKLDPNNKEGPVLILGRSMQPGSDQNHFCQPTDVAVDPGTGAIYVSDGYCNSRIVQFSPSGKFITQWGEESSGSSPLPGQFTVPHSLALVPLLGQLCVADRENGRIQCFKTDTKEFVREIKHSSFGRNVFAISYIPGLLFAVNGKPHFGDQEPVQGFVMNFSNGEIIDIFKPVRKHFDMPHDIVASEDGTVYIGDAHTNTVWKFTLTEKLEHRSVKKAGIEVQEIKEAEAVVETKMENKPTSSELQKMQEKQKLIKEPGSG

SEQ ID NO: 2803 - protein, 258 aa, synthetic construct
  REGION 1..258: note = PARM1 (Q6UWI2) SP+PP+ECD
MVYKTLFALCILTAGWRVQSLPTSAPLSVSLPTNIVPPTTIWTSSPQNTDADTASPSNGTHNNSVLPVTASAPTSLLPKNISIESREEEITSPGSNWEGTNTDPSPSGFSSTSGGVHLTTTLEEHSSGTPEAGVAATLSQSAAEPPTLISPQAPASSPSSLSTSPPEVFSASVTTNHSSTVTSTQPTGAPTAPESPTEESSSDHTPTSHATAEPVPQEKTPPTTVSGKVMCELIDMETTTTFPRVIMQEVEHALSSGS

SEQ ID NO: 2804 - protein, 852 aa, synthetic construct
  REGION 1..852: note = PCDH1 (Q08174) SP+PP+ECD
MDSGAGGRRCPEAALLILGPPRMEHLRHSPGPGGQRLLLPSMLLALLLLLAPSPGHATRVVYKVPEEQPPNTLIGSLAADYGFPDVGHLYKLEVGAPYLRVDGKTGDIFTTETSIDREGLRECQNQLPGDPCILEFEVSITDLVQNGSPRLLEGQIEVQDINDNTPNFASPVITLAIPENTNIGSLFPIPLASDRDAGPNGVASYELQAGPEAQELFGLQVAEDQEEKQPQLIVMGNLDRERWDSYDLTIKVQDGGSPPRASSALLRVTVLDTNDNAPKFERPSYEAELSENSPIGHSVIQVKANDSDQGANAEIEYTFHQAPEVVRRLLRLDRNTGLITVQGPVDREDLSTLRFSVLAKDRGTNPKSARAQVVVTVKDMNDNAPTIEIRGIGLVTHQDGMANISEDVAEETAVALVQVSDRDEGENAAVTCVVAGDVPFQLRQASETGSDSKKKYFLQTTTPLDYEKVKDYTIEIVAVDSGNPPLSSTNSLKVQVVDVNDNAPVFTQSVTEVAFPENNKPGEVIAEITASDADSGSNAELVYSLEPEPAAKGLFTISPETGEIQVKTSLDREQRESYELKVVAADRGSPSLQGTATVLVNVLDCNDNDPKFMLSGYNFSVMENMPALSPVGMVTVIDGDKGENAQVQLSVEQDNGDFVIQNGTGTILSSLSFDREQQSTYTFQLKAVDGGVPPRSAYVGVTINVLDENDNAPYITAPSNTSHKLLTPQTRLGETVSQVAAEDFDSGVNAELIYSIAGGNPYGLFQIGSHSGAITLEKEIERRHHGLHRLVVKVSDRGKPPRYGTALVHLYVNETLANRTLLETLLGHSLDTPLDIDIAGDPEYERSKQRGN

SEQ ID NO: 2805 - protein, 715 aa, synthetic construct
  REGION 1..715: note = PCDH10 (Q9P2E7) SP+PP+ECD
MIVLLLFALLWMVEGVFSQLHYTVQEEQEHGTFVGNIAEDLGLDITKLSARGFQTVPNSRTPYLDLNLETGVLYVNEKIDREQICKQSPSCVLHLEVFLENPLELFQVEIEVLDINDNPPSFPEPDLTVEISESATPGTRFPLESAFDPDVGTNSLRDYEITPNSYFSLDVQTQGDGNRFAELVLEKPLDREQQAVHRYVLTAVDGGGGGGVGEGGGGGGGAGLPPQQQRTGTALLTIRVLDSNDNVPAFDQPVYTVSLPENSPPGTLVIQLNATDPDEGQNGEVVYSFSSHISPRARELFGLSPRTGRLEVSGELDYEESPVYQVYVQAKDLGPNAVPAHCKVLVRVLDANDNAPEISFSTVKEAVSEGAAPGTVVALFSVTDRDSEENGQVQCELLGDVPFRLKSSFKNYYTIVTEAPLDREAGDSYTLTVVARDRGEPALSTSKSIQVQVSDVNDNAPRFSQPVYDVYVTENNVPGAYIYAVSATDRDEGANAQLAYSILECQIQGMSVFTYVSINSENGYLYALRSFDYEQLKDFSFQVEARDAGSPQALAGNATVNILIVDQNDNAPAIVAPLPGRNGTPAREVLPRSAEPGYLLTRVAAVDADDGENARLTYSIVRGNEMNLFRMDWRTGELRTARRVPAKRDPQRPYELVIEVRDHGQPPLSSTATLVVQLVDGAVEPQGGGGSGGGGSGEHQRPSRSGGGETSLDLT

SEQ ID NO: 2806 - protein, 812 aa, synthetic construct
  REGION 1..812: note = PCDH11X (Q9BZA7) SP+PP+ECD
MDLLSGTYIFAVLLACVVFHSGAQEKNYTIREEMPENVLIGDLLKDLNLSLIPNKSLTTAMQFKLVYKTGDVPLIRIEEDTGEIFTTGARIDREKLCAGIPRDEHCFYEVEVAILPDEIFRLVKIRFLIEDINDNAPLFPATVINISIPENSAINSKYTLPAAVDPDVGINGVQNYELIKSQNIFGLDVIETPEGDKMPQLIVQKELDREEKDTYVMKVKVEDGGFPQRSSTAILQVSVTDTNDNHPVFKETEIEVSIPENAPVGTSVTQLHATDADIGENAKIHFSFSNLVSNIARRLFHLNATTGLITIKEPLDREETPNHKLLVLASDGGLMPARAMVLVNVTDVNDNVPSIDIRYIVNPVNDTVVLSENIPLNTKIALITVTDKDADHNGRVTCFTDHEIPFRLRPVFSNQFLLETAAYLDYESTKEYAIKLLAADAGKPPLNQSAMLFIKVKDENDNAPVFTQSFVTVSIPENNSPGIQLTKVSAMDADSGPNAKINYLLGPDAPPEFSLDCRTGMLTVVKKLDREKEDKYLFTILAKDNGVPPLTSNVTVFVSIIDQNDNSPVFTHNEYNFYVPENLPRHGTVGLITVTDPDYGDNSAVTLSILDENDDFTIDSQTGVIRPNISFDREKQESYTFYVKAEDGGRVSRSSSAKVTINVVDVNDNKPVFIVPPSNCSYELVLPSTNPGTVVFQVIAVDNDTGMNAEVRYSIVGGNTRDLFAIDQETGNITLMEKCDVTDLGLHRVLVKANDLGQPDSLFSVVIVNLFVNESVTNATLINELVRKSTEAPVTPNTEIADVSSPTSDYVK

SEQ ID NO: 2807 - protein, 844 aa, synthetic construct
  REGION 1..844: note = PCDH11Y (Q9BZA8) SP+PP+ECD
MFRVGFLIISSSSSLSPLLLVSVVRVNTTNCHKCLLSGTYIFAVLLVCVVFHSGAQEKNYTIREEIPENVLIGNLLKDLNLSLIPNKSLTTTMQFKLVYKTGDVPLIRIEEDTGEIFTTGARIDREKLCAGIPRDEHCFYEVEVAILPDEIFRLVKIRFLIEDINDNAPLFPATVINISIPENSAINSKYTLPAAVDPDVGINGVQNYELIKSQNIFGLDVIETPEGDKMPQLIVQKELDREEKDTYVMKVKVEDGGFPQRSSTAILQVSVTDTNDNHPVFKETEIEVSIPENAPVGTSVTQLHATDADIGENAKIHFSFSNLVSNIARRLFHLNATTGLITIKEPLDREETPNHKLLVLASDGGLMPARAMVLVNVTDVNDNVPSIDIRYIVNPVNDTVVLSENIPLNTKIALITVTDKDADHNGRVTCFTDHEIPFRLRPVFSNQFLLENAAYLDYESTKEYAIKLLAADAGKPPLNQSAMLFIKVKDENDNAPVFTQSFVTVSIPENNSPGIQLMKVSATDADSGPNAEINYLLGPDAPPEFSLDRRTGMLTVVKKLDREKEDKYLFTILAKDNGVPPLTSNVTVFVSIIDQNDNSPVFTHNEYKFYVPENLPRHGTVGLITVTDPDYGDNSAVTLSILDENDDFTIDSQTGVIRPNISFDREKQESYTFYVKAEDGGRVSRSSSAKVTINVVDVNDNKPVFIVPPYNYSYELVLPSTNPGTVVFQVIAVDNDTGMNAEVRYSIVGGNTRDLFAIDQETGNITLMEKCDVTDLGLHRVLVKANDLGQPDSLFSVVIVNLFVNESVTNATLINELVRKSIEAPVTPNTEIADVSSPTSDYVK

SEQ ID NO: 2808 - protein, 718 aa, synthetic construct
  REGION 1..718: note = PCDH12 (Q9NPG4) SP+PP+ECD
MMQLLQLLLGLLGPGGYLFLLGDCQEVTTLTVKYQVSEEVPSGTVIGKLSQELGREERRRQAGAAFQVLQLPQALPIQVDSEEGLLSTGRRLDREQLCRQWDPCLVSFDVLATGDLALIHVEIQVLDINDHQPRFPKGEQELEISESASLRTRIPLDRALDPDTGPNTLHTYTLSPSEHFALDVIVGPDETKHAELIVVKELDREIHSFFDLVLTAYDNGNPPKSGTSLVKVNVLDSNDNSPAFAESSLALEIQEDAAPGTLLIKLTATDPDQGPNGEVEFFLSKHMPPEVLDTFSIDAKTGQVILRRPLDYEKNPAYEVDVQARDLGPNPIPAHCKVLIKVLDVNDNIPSIHVTWASQPSLVSEALPKDSFIALVMADDLDSGHNGLVHCWLSQELGHFRLKRTNGNTYMLLTNATLDREQWPKYTLTLLAQDQGLQPLSAKKQLSIQISDINDNAPVFEKSRYEVSTRENNLPSLHLITIKAHDADLGINGKVSYRIQDSPVAHLVAIDSNTGEVTAQRSLNYEEMAGFEFQVIAEDSGQPMLASSVSVWVSLLDANDNAPEVVQPVLSDGKASLSVLVNASTGHLLVPIETPNGLGPAGTDTPPLATHSSRPFLLTTIVARDADSGANGEPLYSIRSGNEAHLFILNPHTGQLFVNVTNASSLIGSEWELEIVVEDQGSPPLQTRALLRVMFVTSVDHLRDSARKPGALSMSMLT

SEQ ID NO: 2809 - protein, 1376 aa, synthetic construct
  REGION 1..1376: note = PCDH15 (Q96QU1) SP+PP+ECD
MFRQFYLWTCLASGIILGSLFEICLGQYDDDCKLARGGPPATIVAIDEESRNGTILVDNMLIKGTAGGPDPTIELSLKDNVDYWVLMDPVKQMLFLNSTGRVLDRDPPMNIHSIVVQVQCINKKVGTIIYHEVRIVVRDRNDNSPTFKHESYYATVNELTPVGTTIFTGFSGDNGATDIDDGPNGQIEYVIQYNPDDPTSNDTFEIPLMLTGNIVLRKRLNYEDKTRYFVIIQANDRAQNLNERRTTTTTLTVDVLDGDDLGPMFLPCVLVPNTRDCRPLTYQAAIPELRTPEELNPIIVTPPIQAIDQDRNIQPPSDRPGILYSILVGTPEDYPRFFHMHPRTAELSLLEPVNRDFHQKFDLVIKAEQDNGHPLPAFAGLHIEILDENNQSPYFTMPSYQGYILESAPVGATISDSLNLTSPLRIVALDKDIEDTKDPELHLFLNDYTSVFTVTQTGITRYLTLLQPVDREEQQTYTFSITAFDGVQESEPVIVNIQVMDANDNTPTFPEISYDVYVYTDMRPGDSVIQLTAVDADEGSNGEITYEILVGAQGDFIINKTTGLITIAPGVEMIVGRTYALTVQAADNAPPAERRNSICTVYIEVLPPNNQSPPRFPQLMYSLEISEAMRVGAVLLNLQATDREGDSITYAIENGDPQRVFNLSETTGILTLGKALDRESTDRYILIITASDGRPDGTSTATVNIVVTDVNDNAPVFDPYLPRNLSVVEEEANAFVGQVKATDPDAGINGQVHYSLGNFNNLFRITSNGSIYTAVKLNREVRDYYELVVVATDGAVHPRHSTLTLAIKVLDIDDNSPVFTNSTYTVLVEENLPAGTTILQIEAKDVDLGANVSYRIRSPEVKHFFALHPFTGELSLLRSLDYEAFPDQEASITFLVEAFDIYGTMPPGIATVTVIVKDMNDYPPVFSKRIYKGMVAPDAVKGTPITTVYAEDADPPGLPASRVRYRVDDVQFPYPASIFEVEEDSGRVITRVNLNEEPTTIFKLVVVAFDDGEPVMSSSATVKILVLHPGEIPRFTQEEYRPPPVSELATKGTMVGVISAAAINQSIVYSIVSGNEEDTFGINNITGVIYVNGPLDYETRTSYVLRVQADSLEVVLANLRVPSKSNTAKVYIEIQDENNHPPVFQKKFYIGGVSEDARMFTSVLRVKATDKDTGNYSVMAYRLIIPPIKEGKEGFVVETYTGLIKTAMLFHNMRRSYFKFQVIATDDYGKGLSGKADVLVSVVNQLDMQVIVSNVPPTLVEKKIEDLTEILDRYVQEQIPGAKVVVESIGARRHGDAFSLEDYTKCDLTVYAIDPQTNRAIDRNELFKFLDGKLLDINKDFQPYYGEGGRILEIRTPEAVTSIKKRGESLGYTEGA

SEQ ID NO: 2810 - protein, 707 aa, synthetic construct
  REGION 1..707: note = PCDH17 (O14917) SP+PP+ECD
MYLSICCCFLLWAPALTLKNLNYSVPEEQGAGTVIGNIGRDARLQPGLPPAERGGGGRSKSGSYRVLENSAPHLLDVDADSGLLYTKQRIDRESLCRHNAKCQLSLEVFANDKEICMIKVEIQDINDNAPSFSSDQIEMDISENAAPGTRFPLTSAHDPDAGENGLRTYLLTRDDHGLFGLDVKSRGDGTKFPELVIQKALDREQQNHHTLVLTALDGGEPPRSATVQINVKVIDSNDNSPVFEAPSYLVELPENAPLGTVVIDLNATDADEGPNGEVLYSFSSYVPDRVRELFSIDPKTGLIRVKGNLDYEENGMLEIDVQARDLGPNPIPAHCKVTVKLIDRNDNAPSIGFVSVRQGALSEAAPPGTVIALVRVTDRDSGKNGQLQCRVLGGGGTGGGGGLGGPGGSVPFKLEENYDNFYTVVTDRPLDRETQDEYNVTIVARDGGSPPLNSTKSFAIKILDENDNPPRFTKGLYVLQVHENNIPGEYLGSVLAQDPDLGQNGTVSYSILPSHIGDVSIYTYVSVNPTNGAIYALRSFNFEQTKAFEFKVLAKDSGAPAHLESNATVRVTVLDVNDNAPVIVLPTLQNDTAELQVPRNAGLGYLVSTVRALDSDFGESGRLTYEIVDGNDDHLFEIDPSSGEIRTLHPFWEDVTPVVELVVKVTDHGKPTLSAVAKLIIRSVSGSLPEGVPRVNGEQHHWDMSLP

SEQ ID NO: 2811 - protein, 699 aa, synthetic construct
  REGION 1..699: note = PCDH18 (Q9HCL0) SP+PP+ECD
MHQMNAKMHFRFVFALLIVSFNHDVLGKNLKYRIYEEQRVGSVIARLSEDVADVLLKLPNPSTVRFRAMQRGNSPLLVVNEDNGEISIGATIDREQLCQKNLNCSIEFDVITLPTEHLQLFHIEVEVLDINDNSPQFSRSLIPIEISESAAVGTRIPLDSAFDPDVGENSLHTYSLSANDFFNIEVRTRTDGAKYAELIVVRELDRELKSSYELQLTASDMGVPQRSGSSILKISISDSNDNSPAFEQQSYIIQLLENSPVGTLLLDLNATDPDEGANGKIVYSFSSHVSPKIMETFKIDSERGHLTLFKQVDYEITKSYEIDVQAQDLGPNSIPAHCKIIIKVVDVNDNKPEININLMSPGKEEISYIFEGDPIDTFVALVRVQDKDSGLNGEIVCKLHGHGHFKLQKTYENNYLILTNATLDREKRSEYSLTVIAEDRGTPSLSTVKHFTVQINDINDNPPHFQRSRYEFVISENNSPGAYITTVTATDPDLGENGQVTYTILESFILGSSITTYVTIDPSNGAIYALRIFDHEEVSQITFVVEARDGGSPKQLVSNTTVVLTIIDENDNVPVVIGPALRNNTAEITIPKGAESGFHVTRIRAIDRDSGVNAELSCAIVAGNEENIFIIDPRSCDIHTNVSMDSVPYTEWELSVIIQDKGNPQLHTKVLLKCMIFEYAESVTSTAMTSVSQASLDVS

SEQ ID NO: 2812 - protein, 678 aa, synthetic construct
  REGION 1..678: note = PCDH19 (Q8TAB3) SP+PP+ECD
MESLLLPVLLLLAILWTQAAALINLKYSVEEEQRAGTVIANVAKDAREAGFALDPRQASAFRVVSNSAPHLVDINPSSGLLVTKQKIDRDLLCRQSPKCIISLEVMSSSMEICVIKVEIKDLNDNAPSFPAAQIELEISEAASPGTRIPLDSAYDPDSGSFGVQTYELTPNELFGLEIKTRGDGSRFAELVVEKSLDRETQSHYSFRITALDGGDPPRLGTVGLSIKVTDSNDNNPVFSESTYAVSVPENSPPNTPVIRLNASDPDEGTNGQVVYSFYGYVNDRTRELFQIDPHSGLVTVTGALDYEEGHVYELDVQAKDLGPNSIPAHCKVTVSVLDTNDNPPVINLLSVNSELVEVSESAPPGYVIALVRVSDRDSGLNGRVQCRLLGNVPFRLQEYESFSTILVDGRLDREQHDQYNLTIQARDGGVPMLQSAKSFTVLITDENDNHPHFSKPYYQVIVQENNTPGAYLLSVSARDPDLGLNGSVSYQIVPSQVRDMPVFTYVSINPNSGDIYALRSFNHEQTKAFEFKVLAKDGGLPSLQSNATVRVIILDVNDNTPVITAPPLINGTAEVYIPRNSGIGYLVTVVKAEDYDEGENGRVTYDMTEGDRGFFEIDQVNGEVRTTRTFGESSKSSYELIVVAHDHGKTSLSASALVLIYLSPALDAQESMGSVNLS

SEQ ID NO: 2813 - protein, 890 aa, synthetic construct
  REGION 1..890: note = PCDH20 (Q8N6Y1) SP+PP+ECD
MRGRGNARSSQALGVSWCPATWHPRLDMGRLHRPRSSTSYRNLPHLFLFFLFVGPFSCLGSYSRATELLYSLNEGLPAGVLIGSLAEDLRLLPRSAGRPDPQSQLPERTGAEWNPPLSFSLASRGLSGQYVTLDNRSGELHTSAQEIDREALCVEGGGGTAWSGSVSISSSPSDSCLLLLDVLVLPQEYFRFVKVKIAIRDINDNAPQFPVSQISVWVPENAPVNTRLAIEHPAVDPDVGINGVQTYRLLDYHGMFTLDVEENENGERTPYLIVMGALDRETQDQYVSIIIAEDGGSPPLLGSATLTIGISDINDNCPLFTDSQINVTVYGNATVGTPIAAVQAVDKDLGTNAQITYSYSQKVPQASKDLFHLDENTGVIKLFSKIGGSVLESHKLTILANGPGCIPAVITALVSIIKVIFRPPEIVPRYIANEIDGVVYLKELEPVNTPIAFFTIRDPEGKYKVNCYLDGEGPFRLSPYKPYNNEYLLETTKPMDYELQQFYEVAVVAWNSEGFHVKRVIKVQLLDDNDNAPIFLQPLIELTIEENNSPNAFLTKLYATDADSEERGQVSYFLGPDAPSYFSLDSVTGILTVSTQLDREEKEKYRYTVRAVDCGKPPRESVATVALTVLDKNDNSPRFINKDFSFFVPENFPGYGEIGVISVTDADAGRNGWVALSVVNQSDIFVIDTGKGMLRAKVSLDREQQSSYTLWVEAVDGGEPALSSTAKITILLLDINDNPPLVLFPQSNMSYLLVLPSTLPGSPVTEVYAVDKDTGMNAVIAYSIIGRRGPRPESFRIDPKTGNITLEEALLQTDYGLHRLLVKVSDHGYPEPLHSTVMVNLFVNDTVSNESYIESLLRKEPEINIEEKEPQISIEPTHRKVESVSCMPTL

SEQ ID NO: 2814 - protein, 879 aa, synthetic construct
  REGION 1..879: note = PCDH7 (O60245) SP+PP+ECD
MLRMRTAGWARGWCLGCCLLLPLSLSLAAAKQLLRYRLAEEGPADVRIGNVASDLGIVTGSGEVTFSLESGSEYLKIDNLTGELSTSERRIDREKLPQCQMIFDENECFLDFEVSVIGPSQSWVDLFEGQVIVLDINDNTPTFPSPVLTLTVEENRPVGTLYLLPTATDRDFGRNGIERYELLQEPGGGGSGGESRRAGAADSAPYPGGGGNGASGGGSGGSKRRLDASEGGGGTNPGGRSSVFELQVADTPDGEKQPQLIVKGALDREQRDSYELTLRVRDGGDPPRSSQAILRVLITDVNDNSPRFEKSVYEADLAENSAPGTPILQLRAADLDVGVNGQIEYVFGAATESVRRLLRLDETSGWLSVLHRIDREEVNQLRFTVMARDRGQPPKTDKATVVLNIKDENDNVPSIEIRKIGRIPLKDGVANVAEDVLVDTPIALVQVSDRDQGENGVVTCTVVGDVPFQLKPASDTEGDQNKKKYFLHTSTPLDYEATREFNVVIVAVDSGSPSLSSNNSLIVKVGDTNDNPPMFGQSVVEVYFPENNIPGERVATVLATDADSGKNAEIAYSLDSSVMGIFAIDPDSGDILVNTVLDREQTDRYEFKVNAKDKGIPVLQGSTTVIVQVADKNDNDPKFMQDVFTFYVKENLQPNSPVGMVTVMDADKGRNAEMSLYIEENNNIFSIENDTGTIYSTMSFDREHQTTYTFRVKAVDGGDPPRSATATVSLFVMDENDNAPTVTLPKNISYTLLPPSSNVRTVVATVLATDSDDGINADLNYSIVGGNPFKLFEIDPTSGVVSLVGKLTQKHYGLHRLVVQVNDSGQPSQSTTTLVHVFVNESVSNATAIDSQIARSLHIPLTQDIAGDPSYEISKQRLS

SEQ ID NO: 2815 - protein, 749 aa, synthetic construct
  REGION 1..749: note = PCDH8 (O95206) SP+PP+ECD
MSPVRRWGSPCLFPLQLFSLCWVLSVAQSKTVRYSTFEEDAPGTVIGTLAEDLHMKVSGDTSFRLMKQFNSSLLRVREGDGQLTVGDAGLDRERLCGQAPQCVLAFDVVSFSQEQFRLVHVEVEVRDVNDHAPRFPRAQIPVEVSEGAAVGTRIPLEVPVDEDVGANGLQTVRLAEPHSPFRVELQTRADGAQCADLVLLQELDRESQAAYSLELVAQDGGRPPRSATAALSVRVLDANDHSPAFPQGAVAEVELAEDAPVGSLLLDLDAADPDEGPNGDVVFAFGARTPPEARRLFRLDPRSGRLTLAGPVDYERQDTYELDVRAQDRGPGPRAATCKVIVRIRDVNDNAPDIAITPLAAPGAPATSPFAAAAAAAALGGADASSPAGAGTPEAGATSLVPEGAARESLVALVSTSDRDSGANGQVRCALYGHEHFRLQPAYAGSYLVVTAASLDRERIAEYNLTLVAEDRGAPPLRTVRPYTVRVGDENDNAPLFTRPVYEVSVRENNPPGAYLATVAARDRDLGRNGQVTYRLLEAEVGRAGGAVSTYVSVDPATGAIYALRSFDYETLRQLDVRIQASDGGSPQLSSSALVQVRVLDQNDHAPVLVHPAPANGSLEVAVPGRTAKDTVVARVQARDADEGANGELAFELQQQEPREAFAIGRRTGEILLTGDLSQEPPGRVFRALLVISDGGRPPLTTTATVSFVVTAGGGRGPAAPASAGSPERSRPPGSRLGVSGSVLQWDTP

SEQ ID NO: 2816 - protein, 814 aa, synthetic construct
  REGION 1..814: note = PCDH9 (Q9HC56) SP+PP+ECD
MDLRDFYLLAALIACLRLDSAIAQELIYTIREELPENVPIGNIPKDLNISHINAATGTSASLVYRLVSKAGDAPLVKVSSSTGEIFTTSNRIDREKLCAGASYAEENECFFELEVVILPNDFFRLIKIKIIVKDTNDNAPMFPSPVINISIPENTLINSRFPIPSATDPDTGFNGVQHYELLNGQSVFGLDIVETPEGEKWPQLIVQQNLDREQKDTYVMKIKVEDGGTPQKSSTAILQVTVSDVNDNRPVFKEGQVEVHIPENAPVGTSVIQLHATDADIGSNAEIRYIFGAQVAPATKRLFALNNTTGLITVQRSLDREETAIHKVTVLASDGSSTPARATVTINVTDVNDNPPNIDLRYIISPINGTVYLSEKDPVNTKIALITVSDKDTDVNGKVICFIEREVPFHLKAVYDNQYLLETSSLLDYEGTKEFSFKIVASDSGKPSLNQTALVRVKLEDENDNPPIFNQPVIELSVSENNRRGLYLTTISATDEDSGKNADIVYQLGPNASFFDLDRKTGVLTASRVFDREEQERFIFTVTARDNGTPPLQSQAAVIVTVLDENDNSPKFTHNHFQFFVSENLPKYSTVGVITVTDADAGENKAVTLSILNDNDNFVLDPYSGVIKSNVSFDREQQSSYTFDVKATDGGQPPRSSTAKVTINVMDVNDNSPVVISPPSNTSFKLVPLSAIPGSVVAEVFAVDVDTGMNAELKYTIVSGNNKGLFRIDPVTGNITLEEKPAPTDVGLHRLVVNISDLGYPKSLHTLVLVFLYVNDTAGNASYIYDLIRRTMETPLDRNIGDSSQPYQNEDYLT

SEQ ID NO: 2817 - protein, 697 aa, synthetic construct
  REGION 1..697: note = PCDHA1 (Q9Y5I3) SP+PP+ECD
MVFSRRGGLGARDLLLWLLLLAAWEVGSGQLHYSIPEEAKHGTFVGRVAQDLGLELAELVPRLFRVASKTHRDLLEVNLQNGILFVNSRIDREELCQWSAECSIHLELIADRPLQVFHVEVKVKDINDNPPVFRGREQIIFIPESRLLNSRFPIEGAADADIGANALLTYTLSPSDYFSLDVEASDELSKSLWLELRKYLDREETPELHLLLTATDGGKPELQGTVELLITVLDVNDNAPLFDQAVYRVHLLETTANGTLVTTLNASDADEGVNGEVVFSFDSGISRDIQEKFKVDSSSGEIRLIDKLDYEETKSYEIQVKAVDKGSPPMSNHCKVLVKVLDVNDNAPELAVTSLYLPIREDAPLSTVIALITVSDRDSGANGQVTCSLMPHVPFKLVSTFKNYYSLVLDSALDRESLSVYELVVTARDGGSPSLWATARVSVEVADVNDNAPAFAQPEYTVFVKENNPPGCHIFTVSARDADAQENALVSYSLVERRVGERALSNYVSVHAESGKVYALQPLDHEELELLQFQVSARDAGVPPLGSNVTLQVFVLDENDNAPALLAPRVGGTIGAVSELVPRLVGAGHVVAKVRAVDADSGYNAWLSYELQPAAGGARIPFRVGLYTGEISTTRVLDEADLSRYRLLVLVKDHGEPALTATATVLVSLVESGQAPKASSRASVGVAGPEAALVDVN

SEQ ID NO: 2818 - protein, 695 aa, synthetic construct
  REGION 1..695: note = PCDHA10 (Q9Y5I2) SP+PP+ECD
MVSRCSCLGVQCLLLSLLLLAAWEVGSGQLHYSVYEEARHGTFVGRIAQDLGLELAELVQRLFRVASKRHGDLLEVNLQNGILFVNSRIDREELCGRSVECSIHLEVIVDRPLQVFHVDVEVKDINDNPPRFSVTEQKLSIPESRLLDSRFPLEGASDADVGENALLTYKLSPNEYFVLDIINKKDKDKFPVLVLRKLLDREENPQLKLLLTATDGGKPEFTGSVSLLILVLDANDNAPIFDRPVYEVKMYENQVNQTLVIRLNASDSDEGINKEMMYSFSSLVPPTIRRKFWINERTGEIKVNDAIDFEDSNTYEIHVDVTDKGNPPMVGHCTVLVELLDENDNSPEVIVTSLSLPVKEDAQVGTVIALISVSDHDSGANGQVTCSLTPHVPFKLVSTYKNYYSLVLDSALDRERVSAYELVVTARDGGSPPLWATASVSVEVADVNDNAPAFAQSEYTVFVKENNPPGCHIFTVSAWDADAQENALVSYSLVERRLGERSLSSYVSVHAESGKVYALQPLDHEELELLQFQVSARDGGVPPLGSNLTLQVFVLDENDNAPALLASPAGSAGGAVSELVLRSVVAGHVVAKVRAVDADSGYNAWLSYELQSAAVGARIPFRVGLYTGEISTTRALDETDSPRQRLLVLVKDHGEPSLTATATVLVSLVEGSQAPKASSRASVGVAPEVALVDVN

SEQ ID NO: 2819 - protein, 696 aa, synthetic construct
  REGION 1..696: note = PCDHA11 (Q9Y5I1) SP+PP+ECD
MFGFQRRGLGTPRLQLWLLLLEFWEVGSGQLHYSVSEEAKHGTFVGRIAQDLGLELAELVQRLFRVASKTHGDLLEVNLQNGILFVNSRIDREELCGQSAECSIHLEVIVDRPLQVFHVNVEVKDINDNPPVFSLREQKLLIAESKQSDSRFPLEGASDADIEENALLTYRLSKNEYFSLDSPTNGKQIKRLSLILKKSLDREKTPELNLLLTATDGGKPELTGTVRLLVQVLDVNDNDPEFDKSEYKVSLMENAAKETLVLKLNATDRDEGVNGEVTYSLMSIKPNGRHLFTLDQNNGEVRVNGTLDYEENKFYKIEVQATDKGTPPMAGHCTVWVEILDTNDNSPEVAVTSLSLPVREDAQPSTVIALISVSDRDSGVNGQVTCSLTPHVPFKLVSTFKNYYSLVLDSALDRENVWAYELVVTARDGGSPSLWATARVSVEVADVNDNAPAFAQPEYTVFVKENNPPGCHIFTVSARDADAQENALVSYSLVERRLGDRALSSYVSVHAESGKVYALQPLDHEELELLQFQVSARDAGVPPLSSNVTLQVFVLDENDNAPALLATQAGSAGGAVNKLVPRSVGAGHVVAKVRAVDADSGYNAWLSYELQPAAGGSRIPFRVGLYTGEISTTRALDEADSPRHRLLVLVKDHGEPALTATATVLVSLVESGQAPKASSRTLAGAASPEAALVDVN

SEQ ID NO: 2820 - protein, 697 aa, synthetic construct
  REGION 1..697: note = PCDHA12 (Q9UN75) SP+PP+ECD
MVIIGPRGPGSQRLLLSLLLLAAWEVGSGQLHYSVYEEAKHGTFVGRIAQDLGLELAELVPRLFRVASKRHGDLLEVNLQNGILFVNSRIDREKLCGRSAECSIHLEVIVDRPLQVFHVDVEVKDINDNPPVFREREQKVPVSESAPLDSHFPLEGASDADIGVNSLLTYALSLNENFELKIKTKKDKSILPELVLRKLLDREQTPKLNLLLMVIDGGKPELTGSVQIQITVLDVNDNGPAFDKPSYKVVLSENVQNDTRVIQLNASDPDEGLNGEISYGIKMILPVSEKCMFSINPDTGEIRIYGELDFEENNAYEIQVNAIDKGIPSMAGHSMVLVEVLDVNDNVPEVMVTSLSLPVQEDAQVGTVIALISVSDRDSGANGQVICSLTPHVPFKLVSTYKNYYSLVLDSALDRESVSAYELVVTARDGGSPSLWATARVSVEVADVNDNAPAFAQPEYTVFVKENNPPGCHIFTVSAWDADAQKNALVSYSLVERRVGEHALSSYVSVHAESGKVYALQPLDHEELELLQFQVSARDAGVPPLGSNVTLQVFVLDENDNAPALLATPAGSAGGAVSELVPRSVGAGHVVAKVRAVDADSGYNAWLSYELQPAAVGAHIPFHVGLYTGEISTTRILDEADAPRHRLLVLVKDHGEPALTSTATVLVSLVENGQAPKTSSRASVGAVDPEAALVDIN

SEQ ID NO: 2821 - protein, 697 aa, synthetic construct
  REGION 1..697: note = PCDHA13 (Q9Y5I0) SP+PP+ECD
MLSSWQGGPRPRQLLLWLLILAAWETGSGQLHYSVPEEAKHGTFVGRIAQDLGLELAELVPRLFRVASKRHGDLLEVNLQNGILFVNSRIDREELCGRSAECSIHLEVIVDRPLQVFHVEVKVRDINDNPPIFPESKKRIIIAESRPPETRFPLDGASDADIGVNSALTYRLDPNDYFTLDAQNSLEQMSSLSLVLRKTLDREEIQEHSLLLTASDGGKPELTGTVQLLITILDVNDNAPEFYQSVYKVTVLENAFNGTLVIKLNATDPDDGTNGDIVYSFRRPVWPAVVYAFTINPNNGEIRTKGKLDFEEKKLYEISVEAVDKGNIPMAGHCTLLVEVLDVNDNAPEVTITSLSLPIREDTQPSAIIALISVSDRDSGSNGQVTCTLTPHVPFKLVSTYKNYYSLVLDSALDRESVSAYELVVTARDGGSPSLWATASVSVGVADVNDNAPAFAQPEYTVFVKENNPPGCHIFTVSAQDADAQENALVSYSLVERRVGERALSSYVSVHAESGKVYALQPLDHEELELLQFQVSARDSGVPPLGSNVTLQVFVLDENDNAPALLTPGAGSAGGTVSELMPRSVGAGHVVAKVRAVDADSGYNAWLSYELQLAAVGARIPFRVGLYTGEISTTRPLDEVDAPHHRLLVLVKDHGEPALTATATVLLSLVESGQAPQASSRASAGAVGPEAALVDVN

SEQ ID NO: 2822 - protein, 697 aa, synthetic construct
  REGION 1..697: note = PCDHA2 (Q9Y5H9) SP+PP+ECD
MASSIRRGRGAWTRLLSLLLLAAWEVGSGQLRYSVPEEAKHGTFVGRIAQDLGLELEELVPRLFRVASKRHGDLLEVNLQNGILFVNSRIDREELCGRSAECSIHVEVIVDRPLQVFHVEVEVKDINDNPPIFPMTVKTIRFPESRLLDSRFPLEGASDADIGVNALLSYKLSSSEFFFLDIQANDELSESLSLVLGKSLDREETAEVNLLLVATDGGKPELTGTVQILIKVLDVNDNEPTFAQSVYKVKLLENTANGTLVVKLNASDADEGPNSEIVYSLGSDVSSTIQTKFTIDPISGEIRTKGKLDYEEAKSYEIQVTATDKGTPSMSGHCKISLKLVDINDNTPEVSITSLSLPISENASLGTVIALITVSDRDSGTNGHVTCSLTPHVPFKLVSTFKNYYSLVLDSALDRESVSAYELVVTARDGGSPSLWATTSVSIEVADVNDNAPAFAQPEYTVFVKENNPPGCHIFTVSAWDADAQENALVSYSLVERRVGERALSSYVSVHAESGKVYALQPLDHEEVELLQFQVSARDAGVPPLGSNVTLQVFVLDENDNAPALLAPRAGTAAGAVSELVPWSVGAGHVVAKVRAVDADSGYNAWLSYELQLGTGSARIPFRVGLYTGEISTTRALDEADSPRHRLLVLVKDHGEPALTATATVLVSLVESGQAPKASSRAWVGAAGSEATLVDVN

SEQ ID NO: 2823 - protein, 697 aa, synthetic construct
  REGION 1..697: note = PCDHA3 (Q9Y5H8) SP+PP+ECD
MLFSWREDPGAQCLLLSLLLLAASEVGSGQLHYSVSEEAKHGTFVGRIAQDLGLELAELVPRLFRVASKRHGDLLEVNLQNGILFVNSRIDREELCGRSAECSIHLEVIVDRPLQVFHVEVEVKDINDNAPVFPMAVKNLFISESRQPGSRFSLEGASDADIGTNSLLTYSLDSTEYFTLDVKRNDEEIKSLGLVLKKNLNREDTPKHYLLITAIDGGKPELTGTTQLKITVLDVNDNAPAFERTIYKVRLLENAPNGTLVVTVNATDLDEGVNKDIAYSFNTDMSADILSKFHLDPVNGQISVKGNIDFEESKSYEIQVEATDKGNPPMSDHCTVLLEIVDINDNVPELVIQSLSLPVLEDSPLSTVIALISVSDRDSGVNGQVTCSLTPHVPFKLVSTFKNYYSLVLDSPLDRESVSAYELVVTARDGGSPSLWATASVSVEVADVNDNAPAFSQSEYTVFVKENNPPGCHIFTVSARDADAQENALVSYSLVERRVGERALSSYVSVHAESGKVYALQPLDHEELELLQFQVSARDAGVPPLGSNVTLQVFVLDENDNAPALLMPRVGGIGGAVSELVPRSVGAGHVVAKVRAVDADSGYNAWLSYELQPGTGGARIPFRVGLYTGEISTTRALDEVDAPRHRLLVLVKDHGEPSLTATATVLVSLVESGQAPKASSQASAGATGPEAALVDVN

SEQ ID NO: 2824 - protein, 697 aa, synthetic construct
  REGION 1..697: note = PCDHA4 (Q9UN74) SP+PP+ECD
MEFSWGSGQESRRLLLLLLLLAAWEAGNGQLHYSVSEEAKHGTFVGRIAQDLGLELAELVPRLFRVASKGRGGLLEVNLQNGILFVNSRIDREELCRRSAECSIHLEVIVDRPLQVFHVDVEVRDINDNPPVFPATQKNLSIAESRPLDSRFPLEGASDADIGENALLTYRLSPNEYFSLEKPPDDELVKGLGLILRKSLDREEAPEIFLVLTATDGGKPELTGTVQLLITVLDANDNAPAFDRTIYKVRLLENVPNGTLVIKLNASDLDEGLNGDIVYSFSNDISPNVKSKFHIDPITGQIIVKGYIDFEESKSYEIIVEGIDKGQLPLSGHCRVIVEVEDNNDNVPDLEFKSLSLPIREDAPLGTVIALISVSDKDMGVNGLVTCSLTSHVPFKLVSTFKNYYSLVLDSALDRESVSAYELVVTARDGGSPSLWATASVSVEVADVNDNAPAFAQPEYTVFVKENNPPGCHIFTVSAWDADAQENALVSYSLVERRVGERALSSYVSVHAESGKVYALQPLDHEELELLQFQVTARDAGVPPLGSNVTLQVFVLDENDNAPALLAPRAGGTGGAVSELVPWSVGVGHVVAKVRAVDADSGYNAWLSYELQPGTGGARIPFRVGLYTGEISTTRALDETDAPRHRLLVLVKDHGEPALTATATVLVSLVESGQAPKASSRALVGAVGPDAALVDVN

SEQ ID NO: 2825 - protein, 696 aa, synthetic construct
  REGION 1..696: note = PCDHA5 (Q9Y5H7) SP+PP+ECD
MVYSRRGSLGSRLLLLWLLLAYWKAGSGQLHYSIPEEAKHGTFVGRIAQDLGLELAELVPRLFRVASKGRGDLLEVNLQNGILFVNSRIDREELCRRRAECSIHLEVIVDRPLQVFHVEVAVKDINDNPPRFSRQEQRLFILESRMPDSRFPLEGASDLDIGANAQLRYRLNPNEYFDLDVKTNEEETNFLELVLRKSLDREETQEHRLLVIATDGGKPELTGTVQLLINVLDANDNAPEFDKSIYNVRLLENAPSGTLVIKLNASDADEGINKEIVYFFSNLVLDDVKSKFIINSNTGEIKVNGELDYEDYNSYEINIDAMDKSTFPLSGHCKVVVKLLDVNDNTPEMAITTLFLPVKEDAPLSTVIALISVSDRDSGANGQVTCSLMPHVPFKLVSTFKNYYSLVLDSALDRESVSVYELVVTARDGGSPSLWATASVSVEVADVNDNAPAFAQPQYTVFVKENNPPGCHIFTVSARDADAQENALVSYSLVERRVGERPLSSYVSVHAESGKVYALQPLDHEEVELLQFQVSARDAGVPPLGSNVTLQVFVLDENDNAPALLVPRVGGTGGAVSELVPRSVGAGHVVAKVRAVDPDSGYNAWLSYELQPAPGSARIPFRVGLYTGEISTTRSLDETEAPRHRLLVLVKDHGEPPLTATATVLVSLVESGQAPKASSRASAGAVGPEAALVDVN

SEQ ID NO: 2826 - protein, 697 aa, synthetic construct
  REGION 1..697: note = PCDHA6 (Q9UN73) SP+PP+ECD
MVFTPEDRLGKQCLLLPLLLLAAWKVGSGQLHYSVPEEAKHGTFVGRIAQDLGLELAELVPRLFRMASKDREDLLEVNLQNGILFVNSRIDREELCGRSAECSIHLEVIVDRPLQVFHVDVEVRDINDNPPLFPVEEQRVLIYESRLPDSVFPLEGASDADVGSNSILTYKLSSSEYFGLDVKINSDDNKQIGLLLKKSLDREEAPAHNLFLTATDGGKPELTGTVQLLVTVLDVNDNAPTFEQSEYEVRIFENADNGTTVIRLNASDRDEGANGAISYSFNSLVAAMVIDHFSIDRNTGEIVIRGNLDFEQENLYKILIDATDKGHPPMAGHCTVLVRILDKNDNVPEIALTSLSLPVREDAQFGTVIALISVNDLDSGANGQVNCSLTPHVPFKLVSTFKNYYSLVLDSALDRESVSAYELVVTARDGGSPSLWATASLSVEVADMNDNAPAFAQPEYTVFVKENNPPGCHIFTVSARDADAQENALVSYSLVERRVGERALSSYISVHAESGKVYALQPLDHEELELLQFQVSARDAGVPPLGSNVTLQVFVLDENDNAPALLAPRVGGTGGAVSELVPRSLGAGQVVAKVRAVDADSGYNAWLSYELQPPASSARFPFRVGLYTGEISTTRVLDEADSPRHRLLVLVKDHGEPALTATATVLVSLVESGQAPKASSRASVGAAGPEAALVDVN

SEQ ID NO: 2827 - protein, 697 aa, synthetic construct
  REGION 1..697: note = PCDHA7 (Q9UN72) SP+PP+ECD
MVCPNGYDPGGRHLLLFIIILAAWEAGRGQLHYSVPEEAKHGNFVGRIAQDLGLELAELVPRLFRAVCKFRGDLLEVNLQNGILFVNSRIDREELCGRSAECSIHLEVIVERPLQVFHVDVEVKDINDNPPVFPATQRNLFIAESRPLDSRFPLEGASDADIGENALLTYRLSPNEYFFLDVPTSNQQVKPLGLVLRKLLDREETPELHLLLTATDGGKPELTGTVQLLITVLDNNDNAPVFDRTLYTVKLPENVSIGTLVIHPNASDLDEGLNGDIIYSFSSDVSPDIKSKFHMDPLSGAITVIGHMDFEESRAHKIPVEAVDKGFPPLAGHCTVLVEVVDVNDNAPQLTLTSLSLPIPEDAQPGTVITLISVFDRDFGVNGQVTCSLTPRVPFKLVSTFKNYYSLVLDSALDRESVSAYELVVTARDGGSPSLWATASVSVEVADVNDNAPAFAQPEYTVFVKENNPPGCHIFTVSAGDADAQKNALVSYSLVELRVGERALSSYVSVHAESGKVYALQPLDHEELELLQFQVSARDAGVPPLGSNVTLQVFVLDENDNAPALLAPRVGGTGGAVRELVPRSVGAGHVVAKVRAVDADSGYNAWLSYELQPVAAGASIPFRVGLYTGEISTTRALDETDAPRHRLLVLVKDHGEPSLTATATVLVSLVESGQAPKASSRASLGIAGPETELVDVN

SEQ ID NO: 2828 - protein, 697 aa, synthetic construct
  REGION 1..697: note = PCDHA8 (Q9Y5H6) SP+PP+ECD
MDYHWRGELGSWRLLLLLLLLAAWKVGSGQLHYSVPEEAKHGTFVGRIAQDLGLELAELVPRLFRVASKRHRDLLEVSLQNGILFVNSRIDREELCGRSAECSIHLEVIVDRPLQVFHVDVEVKDVNDNPPVFRVKDQKLFVSESRMPDSRFPLEGASDADVGANSVLTYRLSSHDYFMLDVNSKNDENKLVELVLRKSLDREDAPAHHLFLTATDGGKPELTGTVQLLVTVLDVNDNAPTFEQSEYEVRIFENADNGTTVIKLNASDPDEGANGAISYSFNSLVETMVIDHFSIDRNTGEIVIRGNLDFEQENLYKILIDATDKGHPPMAGHCTVLVRILDKNDNVPEIALTSLSLPVREDAQFGTVIALISVNDLDSGANGQVTCSLMPHVPFKLVSTFKNYYSLVLDSALDRERVSAYELVVTARDGGSPSLWATASLSVEVADVNDNAPAFAQPEYTVFVKENNPPGCHIFTVSARDADAQENALVSYSLVERRVGERSLSSYISVHTESGKVYALQPLDHEELELLQFQVSARDAGVPPLGSNVTLQVFVLDENDNAPALLEPRVGGTGGAASKLVPRSVGAGHVVAKVRAVDADSGYNAWLSYELQPAASSPRIPFRVGLYTGEISTTRVLDEADSPRHRLLVLVKDHGEPALTATATVLVSLVESGQAPKASSRQSAGVLGPEAALVDVN

SEQ ID NO: 2829 - protein, 697 aa, synthetic construct
  REGION 1..697: note = PCDHA9 (Q9Y5H5) SP+PP+ECD
MLYSSRGDPEGQPLLLSLLILAMWVVGSGQLHYSVPEEAEHGTFVGRIAQDLGLELAELVPRLFQLDSKGRGDLLEVNLQNGILFVNSRIDREELCGRSAECSIHLEVIVDRPLQVFHVDVEVKDINDNPPVFPATQKNLFIAESRPLDSRFPLEGASDADIGENALLTYRLSPNEYFFLDVPTSNQQVKPLGLVLRKLLDREETPELHLLLTATDGGKPELTGTVQLLITVLDNNDNAPVFDRTLYTVKLPENVSIGTLVIHPNASDLDEGLNGDIIYSFSSDVSPDIKSKFHMDPLSGAITVIGHMDFEESRAHKIPVEAVDKGFPPLAGHCTLLVEVVDVNDNAPQLTIKTLSVPVKEDAQLGTVIALISVIDLDADANGQVTCSLTPHVPFKLVSTYKNYYSLVLDRALDRESVSAYELVVTARDGGSPSLWATARVSVEVADVNDNAPAFAQSEYTVFVKENNPPGCHIFTVSARDADAQENALVSYSLVERRLGERSLSSYVSVHAESGKVYALQPLDHEELELLQFQVSARDAGVPPLGSNVTLQVFVLDENDNAPALLTPRMRGTDGAVSEMVLRSVGAGVVVGKVRAVDADSGYNAWLSYELQPETASASIPFRVGLYTGEISTTRALDETDAPRQRLLVLVKDHGEPALTATATVLVSLVESGQAPKSSSRASVGATGPEVTLVDVN

SEQ ID NO: 2830 - protein, 683 aa, synthetic construct
  REGION 1..683: note = PCDHAC1 (Q9H158) SP+PP+ECD
MVGCGVAVLCLWVSCGAAAGQLEYSVPEETERGVAVGNLSADLRLPAAAMSSRNFRFLSSHRELYFGVDLPSGNLVVREPADREQLCRAKAACVLTYDLVLEDPLELHKIRIHVLDTNDNSPLFPAGDVQLHIPEFLTPGARFTLPNAQDDDEGSNGILSYSLSPSQHFRLDMGSRVDGSEYPELVLEKALDREQRATHLLVLTARDGGLPARSGDAQVTIIVVDTNDNAPVFERSVYRTKVPETAPNGTVLFRVQALDPDEGSNGEVQYSLSNSTQAELRHRFHVHPKSGEVQVAASLGPPETLLEAYIEARDEGVFGLASTAKLLVEVTDVNDHAPELDFLTLSNPVPEDAAPGTVIALFSVKDEDLDSNGRVICGMSSAGPFQLTASFDNYYSLLIDGPLDREQISEYQVLITASDSGSPPLSTRRTITVSVADVNDNTPNFPQPQQELFVAENNGPGASLGRVFAQDPDLGKNGLVSYELLDVISEGPSASSLLAVESSSGAITAKTSFDFEQLRGFHFQVEGRDGGIPPRSATVTINLFVVDRNDNYPVILFPLPRNGSVPVEIVPRSARTGHLVTKVVAEDADSGSNAWLSYHISRASDSSLFRISANIGELRTARLVLPTDAVKQRVVVVVRDHGDPPLSSSVTLGVLLSNSVPQLLPDFEDVWEPGGQLSAQNLY

SEQ ID NO: 2831 - protein, 708 aa, synthetic construct
  REGION 1..708: note = PCDHAC2 (Q9Y5I4) SP+PP+ECD
MEQAGTRPAATEHPRLRRPMPWLLLLPLLLLLLLLLPGPAASQLRYSVPEEQAPGALVGNVARALGLELRRLGPGCLRINHLGAPSPRYLELDLTSGALFVNERIDREALCEQRPRCLLSLEVLAHNPVAVSAVEVEILDINDNSPRFPRPNYQLQVSESVAPGARFHIESAQDPDVGANSVQTYELSPSEHFELDLKPLQENSKVLELVLRKGLDREQAALHHLVLTAVDGGIPARSGTAQISVRVLDTNDNSPAFDQSTYRVQLREDSPPGTLVVKLNASDPDEGSNGELRYSLSSYTSDRERQLFSIDASTGEVRVIGGLDYEEASSYQIYVQATDRGPVPMAGHCKVLVDIVDVNDNAPEVVLTDLYSPVPENATPNTIVAVLSVNDQDSGPNRKVSLGLEATLPFRLNGFGNSYTLVVSGPLDRERVAVYNITVTATDGGIPQLTSLRTLKVEISDINDNPPSFLEDSYSIYIQENNLPGVLLCTVQATDPDEKENAEVTYSLLEREIQGLPVTSYVSINSASGSLYAVNSFDYEKFREFFVTVEAQDKGSPPLSSTVTANVYVVDMNDHAPHILYPTSTNSSAAFEMVPRTAPAGYLVTKVIAMDSDSGQNAWLFYHLAQTSDLDLFKVELHTGEIRTTRKMGDESGSTFNLTVVVRDNGEPSLSASVAITVAVVDRVSKILPDTQRHVKSPRTYSEITLYL

SEQ ID NO: 2832 - protein, 691 aa, synthetic construct
  REGION 1..691: note = PCDHB1 (Q9Y5F3) SP+PP+ECD
MAGTRRKSLQNRQVGSLLIFLCISVGDATTIRYSVAEEMESGSFVANVAKDLGLEVGKLAARGARLVSEGNKMHFRLHRKTGDLFVKEKLDRESLCGKADPCVLHFEVVLVEPLQSFRAEVRVFDINDNAPVFLNKEPLLKIPESTPLGSRFPLQSAQDLDVGLNGLQNYTLSANGYFHLHTRFCSHGPKYAELVLNKPLDREEQPEVNLTITAVDGGSPPKSGTAHIHVVVLDVNDHVPQFSRLVYRAQVSENSPNGSLVATVTAVDLDEGTNKAITYSLAQNPEAILKTFQIDPQNGEVRLRGPLDFEAIETYDIDIQATDGGGLSAHSKVLVEVVDVNDNPPEVMVSSVSSPLPEDSPPQTVVALFTIRDRDIRVGGKVTCFLREDLPFVIKPTFGNSYSLVTDRSLDREEVSGYNITIVAMDTGPPSLSAETMIEVLISDVNDNPPIFREDSYILTVRENNSPAVFIGKVHAEDLDLGENAQITYSLLPPKNGDLSVFAYISINSGNGKLYALRTMDYEAIQDFQFVVKATDGGFLSLSSQVTVRVVVLDDNDNRPMILYPLQNGTLPCNDLVPRSAEAGYLVTKVVAVDGDSGQNSWLSYHLLKATDLGLFSVQRQNGEIHTLRQISERDPMMQKLIILVQDHGQPALSTTVSLNILLVDGFSEPYLQFQDPTKHSRKVNPSTKYL

SEQ ID NO: 2833 - protein, 692 aa, synthetic construct
  REGION 1..692: note = PCDHB10 (Q9UN67) SP+PP+ECD
MAVRELCFPRQRQVLFLFLFWGVSLAGSGFGRYSVTEETEKGSFVVNLAKDLGLAEGELAARGTRVVSDDNKQYLLLDSHTGNLLTNEKLDREKLCGPKEPCMLYFQILMDDPFQIYRAELRVRDINDHAPVFQDKETVLKISENTAEGTAFRLERAQDPDGGLNGIQNYTISPNSFFHINISGGDEGMIYPELVLDKALDREEQGELSLTLTALDGGSPSRSGTSTVRIVVLDVNDNAPQFAQALYETQAPENSPIGFLIVKVWAEDVDSGVNAEVSYSFFDASENIRTTFQINPFSGEIFLRELLDYELVNSYKINIQAMDGGGLSARCRVLVEVLDTNDNPPELIVSSFSNSVAENSPETPLAVFKINDRDSGENGKMVCYIQENLPFLLKPSVENFYILITEGALDREIRAEYNITITVTDLGTPRLKTEHNITVLVSDVNDNAPAFTQTSYTLFVRENNSPALHIGSVSATDRDSGTNAQVTYSLLPPQDPHLPLASLVSINADNGHLFALRSLDYEALQAFEFRVGATDRGSPALSREALVRVLVLDANDNSPFVLYPLQNGSAPCTELVPRAAEPGYLVTKVVAVDGDSGQNAWLSYQLLKATEPGLFGVWAHNGEVRTARLLSERDAAKHRLVVLVKDNGEPPRSATATLHLLLVDGFSQPYLPLPEAAPAQAQAEADLLTVYL

SEQ ID NO: 2834 - protein, 690 aa, synthetic construct
  REGION 1..690: note = PCDHB11 (Q9Y5F2) SP+PP+ECD
MENQGTRTQQIRQVLLLFVLLGMSQAGSETWSFSVAEEMQSGSFVGNLAKDLGLKVRELSSRGARVVSNDKKQRLQLDINTGDLLLSETLDREELCGSIEPCVLHLQVLMQNPTQFLQIELQVRDINDHSPIFSEKQMLLEIPENSPVGAVFLLESAKDLDVGINAVKSYTISPNSHFHIKMRVIPDNRKYPELVLDKALDYEELPELSFILSALDGGSPPRSGTALVRVVVVDINDNSPEFEQAFYEVKIRENSILGSLILIVSAWDLDSGTNGEICYTFSHASEDIRKTFEINQKSGEITLRAPLDFETIESYSIIIQATDGGGLFGKSTVIIHVIDVNDNAPEITVSSITSPIPENTPETVVMVFSIQDIDSGDNGRIVCSIPEDLPFVLKSSVENYYTLETERPLDRESTAEYNITITVTDLGIPRLKTEHNTTVLVSDVNDNAPTFTQTSYTLFVRENNSPALHIGSVSATDRDSGTNAQVNYSLLPPQDLHLPLASLVSINTDNGHLFALRSLDYEALQAFDFRVGATDRGSPALSSEALVRVLVLDANDNSPFVLYPLQNGSAPCTELVPRAAEPGYLVTKVVAVDGDSGQNAWLSYQLLKATEPGLFGVWAHNGEVRTARLLSERDAAKHRLVVLVKDNGEPPRSATATLQVLLVDGFSQPYLPLPEAAPAQAQADSLTVYL

SEQ ID NO: 2835 - protein, 690 aa, synthetic construct
  REGION 1..690: note = PCDHB12 (Q9Y5F1) SP+PP+ECD
MENGGAGTLQIRQVLLFFVLLGMSQAGSETGNFLVMEELQSGSFVGNLAKTLGLEVSELSSRGARVVSNDNKECLQLDTNTGDLLLREMLDREELCGSNEPCVLYFQVLMKNPTQFLQIELQVRDINDHSPVFLEKEMLLEIPENSPVGAVFLLESAKDLDVGINAVKSYTINPNSHFHVKIRVNPDNRKYPELVLDKALDYEERPELSFILTALDGGSPPRSGTALVRVVVVDINDNSPEFEQAFYEVKILENSILGSLVVTVSAWDLDSGTNSELSYTFSHASEDIRKTFEINQKSGDITLTAPLDFEAIESYSIIIQATDGGGLFGKSTVRIQVMDVNDNAPEITVSSITSPIPENTPETVVMVFRIRDRDSGDNGKMVCSIPEDIPFVLKSSVNNYYTLETERPLDRESRAEYNITITVTDLGTPRLKTEHNITVLVSDVNDNAPAFTQTSYALFVRENNSPALHIGSISATDRDSGTNAQVNYSLLPSQDPHLPLASLVSINADNGHLFALRSLDYEALQGFQFRVGATDHGSPALSSEALVRVLVLDANDNSPFVLYPLQNGSAPCTELVPWAAEPGYLVTKVVAVDGDSGQNAWLSYQLLKATEPGLFGVWAHNGEVRTARLLSERDAAKHRLVVLVKDNGEPPRSATATLHVLLVDGFSQPYLPLPEAAPAQAQADSLTVYL

SEQ ID NO: 2836 - protein, 690 aa, synthetic construct
  REGION 1..690: note = PCDHB13 (Q9Y5F0) SP+PP+ECD
MEASGKLICRQRQVLFSFLLLGLSLAGAAEPRSYSVVEETEGSSFVTNLAKDLGLEQREFSRRGVRVVSRGNKLHLQLNQETADLLLNEKLDREDLCGHTEPCVLRFQVLLESPFEFFQAELQVIDINDHSPVFLDKQMLVKVSESSPPGTTFPLKNAEDLDVGQNNIENYIISPNSYFRVLTRKRSDGRKYPELVLDKALDREEEAELRLTLTALDGGSPPRSGTAQVYIEVLDVNDNAPEFEQPFYRVQISEDSPVGFLVVKVSATDVDTGVNGEISYSLFQASEEIGKTFKINPLTGEIELKKQLDFEKLQSYEVNIEARDAGTFSGKCTVLIQVIDVNDHAPEVTMSAFTSPIPENAPETVVALFSVSDLDSGENGKISCSIQEDLPFLLKSAENFYTLLTERPLDRESRAEYNITITVTDLGTPMLITQLNMTVLIADVNDNAPAFTQTSYTLFVRENNSPALHIRSVSATDRDSGTNAQVTYSLLPPQDPHLPLTSLVSINADNGHLFALRSLDYEALQGFQFRVGASDHGSPALSSEALVRVVVLDANDNSPFVLYPLQNGSAPCTELVPRAAEPGYLVTKVVAVDGDSGQNAWLSYQLLKATELGLFGVWAHNGEVRTARLLSERDAAKHRLVVLVKDNGEPPRSATATLHVLLVDGFSQPYLPLPEAAPTQAQADLLTVYL

SEQ ID NO: 2837 - protein, 686 aa, synthetic construct
  REGION 1..686: note = PCDHB14 (Q9Y5E9) SP+PP+ECD
MEIRGALDLRKRQVLIFLVLLGLSRAGTESAHYSVAEETEIGSFVANLARDLGLGVEELSSREARVVSDDNKKYLHLDLLTGNLLLNEKLDRDELCGSTEPCVLHFQVVLENPLQFFRFELCVKDINDHSPTFLDKEILIKISEGTTVGATFLMESAQDLDVGSNSLQNYTISPNSHFYIKIPDSSDRKIYPELVLDRALDYEQEAELRLTLTAVDGGSPPKSGTTLVLIKVLDINDNAPEFPQSLYEVQVPEDRPLGSWIATISAKDLDAGNYGKISYTFFHASEDIRKTFEINPISGEVNLRSPLDFEVIQSYTINIQATDGGGLSGKCTLLVKVMDINDNPPEVTISSITKRIPENASETLVALFSILDQDSGDNGRMICSIQDNLPFFLKPTFKNFFTLVSEKALDRESQAEYNITITVTDLGTPRLKTEYNITVLLSDVNDNAPTFTQTSYTLFVRENNSPALHIGSVSATDRDSGTNAQVNYSLLPPQDRHLPLASLVSINADNGHLFALRSLDYEALQEFEFRVGATDRGSPALSSEALVRVLVLDANDNSPFVLYPLQNGSAPCTELVPRAAEPGYLVTKVVAVDGDSGQNAWLSYQLLKATEPGLFGVWAHNGEVRTARLLSERDAAKHRLVVLVKDNGEPPRSATATLHVLLVDGFSQPYLPLPEAAPAQAQADSL

SEQ ID NO: 2838 - protein, 690 aa, synthetic construct
  REGION 1..690: note = PCDHB15 (Q9Y5E8) SP+PP+ECD
MEPAGERFPEQRQVLILLLLLEVTLAGWEPRRYSVMEETERGSFVANLANDLGLGVGELAERGARVVSEDNEQGLQLDLQTGQLILNEKLDREKLCGPTEPCIMHFQVLLKKPLEVFRAELLVTDINDHSPEFPEREMTLKIPETSSLGTVFPLKKARDLDVGSNNVQNYNISPNSHFHVSTRTRGDGRKYPELVLDTELDREEQAELRLTLTAVDGGSPPRSGTVQILILVLDANDNAPEFVQALYEVQVPENSPVGSLVVKVSARDLDTGTNGEISYSLYYSSQEIDKPFELSSLSGEIRLIKKLDFETMSSYDLDIEASDGGGLSGKCSVSVKVLDVNDNFPELSISSLTSPIPENSPETEVALFRIRDRDSGENGKMICSIQDDVPFKLKPSVENFYRLVTEGALDRETRAEYNITITITDLGTPRLKTEQSITVLVSDVNDNAPAFTQTSYTLFVRENNSPALHIGSVSATDRDSGTNAQVTYSLLPPRDPHLPLTSLVSINTDNGHLFALQSLDYEALQAFEFRVGATDRGFPALSSEALVRVLVLDANDNSPFVLYPLQNGSAPCTELVPRAAEPGYLVTKVVAVDGDSGQNAWLSYQLLKATEPGLFGVWAHNGEVRTARLLSERDVAKHRLVVLVKDNGEPPRSATATLQVLLVDGFSQPYLPLPEAAPAQAQADSLTVYL

SEQ ID NO: 2839 - protein, 690 aa, synthetic construct
  REGION 1..690: note = PCDHB16 (Q9NRJ7) SP+PP+ECD
MEIGWMHNRRQRQVLVFFVLLSLSGAGAELGSYSVVEETERGSFVANLGKDLGLGLTEMSTRKARIISQGNKQHLQLKAQTGDLLINEKLDREELCGPTEPCILHFQVLMENPLEIFQAELRVIDINDHSPMFTEKEMILKIPENSPLGTEFPLNHALDLDVGSNNVQNYKISPSSHFRVLIHEFRDGRKYPELVLDKELDREEEPQLRLTLTALDGGSPPRSGTAQVRIEVVDINDNAPEFEQPIYKVQIPENSPLGSLVATVSARDLDGGANGKISYTLFQPSEDISKTLEVNPMTGEVRLRKQVDFEMVTSYEVRIKATDGGGLSGKCTLLLQVVDVNDNPPQVTMSALTSPIPENSPEIVVAVFSVSDPDSGNNGKTISSIQEDLPFLLKPSVKNFYTLVTERALDREARAEYNITLTVTDMGTPRLKTEHNITVQISDVNDNAPTFTQTSYTLFVRENNSPALHIGSVSATDRDSGTNAQVTYSLLPPQDPHLPLASLVSINADNGHLFALRSLDYEALREFEFRVSATDRGSPALSSEALVRVLVLDANDNSPFVLYPLQNGSAPCTELVPRAAEPGYLVTKVVAVDGDSGQNAWLSYQLLKATEPGLFGVWAHNGEVRTARLLSERDAAKQRLVVLVKDNGEPPRSATATLHVLLVDGFSQPFLPLPEAAPGQTQANSLTVYL

SEQ ID NO: 2840 - protein, 692 aa, synthetic construct
  REGION 1..692: note = PCDHB2 (Q9Y5E7) SP+PP+ECD
MEAGEGKERVPKQRQVLIFFVLLGIAQASCQPRHYSVAEETESGSFVANLLKDLGLEIGELAVRGARVVSKGKKMHLQFDRQTGDLLLNEKLDREELCGPTEPCVLPFQVLLENPLQFFQAELRIRDVNDHSPVFLDKEILLKIPESITPGTTFLIERAQDLDVGTNSLQNYTISPNFHFHLNLQDSLDGIILPQLVLNRALDREEQPEIRLTLTALDGGSPPRSGTALVRIEVVDINDNVPEFAKLLYEVQIPEDSPVGSQVAIVSARDLDIGTNGEISYAFSQASEDIRKTFRLSAKSGELLLRQKLDFESIQTYTVNIQATDGGGLSGTCVVFVQVMDLNDNPPELTMSTLINQIPENLQDTLIAVFSVSDPDSGDNGRMVCSIQDDLPFFLKPSVENFYTLVISTALDRETRSEYNITITVTDFGTPRLKTEHNITVLVSDVNDNAPAFTQTSYTLFVRENNSPALHIGSVSATDRDSGTNAQVTYSLLPPQDPHLPLASLVSINADNGHLFALQSLDYEALQAFEFRVGAADRGSPALSSEALVRVLVLDANDNSPFVLYPLQNGSAPCTELVPRAAEPGYLVTKVVAVDGDSGQNAWLSYQLLKATEPGLFGVWAHNGEVRTARLLRERDAAKQRLVVLVKDNGEPPRSATATLHVLLVDGFSQPYLLLPEAAPAQAQADLLTVYL

SEQ ID NO: 2841 - protein, 690 aa, synthetic construct
  REGION 1..690: note = PCDHB3 (Q9Y5E6) SP+PP+ECD
MEAGGERFLRQRQVLLLFVFLGGSLAGSESRRYSVAEEKEKGFLIANLAKDLGLRVEELAARGAQVVSKGNKQHFQLSHQTGDLLLNEKLDREELCGPTEPCILHFQILLQNPLQFVTNELRIIDVNDHSPVFFENEMHLKILESTLPGTVIPLGNAEDLDVGRNSLQNYTITPNSHFHVLTRSRRDGRKYPELVLDKALDPEEQPELSLTLTALDGGSPPRSGTAQINIQVLDINDNAPEFAQPLYEVAVLENTPVNSVIVTVSASDLDTGSFGTISYAFFHASEEIRKTFQLNPITGDMQLVKYLNFEAINSYEVDIEAKDGGGLSGKSTVIVQVVDVNDNPPELTLSSVNSPIPENSGETVLAVFSVSDLDSGDNGRVMCSIENNLPFFLKPSVENFYTLVSEGALDRETRSEYNITITITDLGTPRLKTKYNITVLVSDVNDNAPAFTQISYTLFVRENNSPALHIGSVSATDRDSGTNAQVTYSLLPPQDPHLPLSSLVSINADNGHLFALRSLDYEALQAFEFRVGATDRGSPALSSEALVRVLVLDANDNSPFVLYPLQNGSAPCTELVPRAAEPGYLVTKVVAVDGDSGQNAWLSYQLLKATEPGLFGVWAHNGEVRTARLLSERDAAKHRLVVLVKDNGEPPRSATATLHVLLVDGFSQPYLPLPEAAPAQAQADLLTVYL

SEQ ID NO: 2842 - protein, 689 aa, synthetic construct
  REGION 1..689: note = PCDHB4 (Q9Y5E5) SP+PP+ECD
MKKLGRIHPNRQVLAFILMVFLSQVRLEPIRYSVLEETESGSFVAHLAKDLGLGIGELASRSARVLSDDDKQRLQLDRQTGDLLLREKLDREELCGPIEPCVLHFQVFLEMPVQFFQGELLIQDINDHSPIFPEREVLLKILENSQPGTLFPLLIAEDLDVGSNGLQKYTISPNSHFHILTRNHSEGKKYPDLVQDKPLDREEQPEFSLTLVALDGGSPPRSGTVMVRILIMDINDNAPEFVHTPYGVQVLENSPLDSPIVRVLARDIDAGNFGSVSYGLFQASDEIKQTFSINEVTGEILLKKKLDFEKIKSYHVEIEATDGGGLSGKGTVVIEVVDVNDNPPELIISSLTSSIPENAPETVVSIFRIRDRDSGENGKMICSIPDNLPFILKPTLKNFYTLVTERPLDRETSAEYNITIAVTDLGTPRLKTQQNITVQVSDVNDNAPAFTQTSYTLFVRENNSPALHIGSVSATDRDSGTNAQVTYSLLPPQDPHLPLASLVSINADNGHLFALRSLDYEALQAFEFRVGASDRGSPALSSEALVRVLVLDTNDNSPFVLYPLQNGSAPCTELVPRAAEPGYLVTKVVAVDGDSGQNAWLSYQLLKATEPGLFGVWAHNGEVRTARLLSERDAAKHRLVVLVKDNGEPPRSATATLHVLLVDGFSQPYLPLPEAAPAQAQADSLTVYL

SEQ ID NO: 2843 - protein, 689 aa, synthetic construct
  REGION 1..689: note = PCDHB5 (Q9Y5E4) SP+PP+ECD
METALAKTPQKRQVMFLAILLLLWEAGSEAVRYSIPEETESGYSVANLAKDLGLGVGELATRGARMHYKGNKELLQLDIKTGNLLLYEKLDREVMCGATEPCILHFQLLLENPVQFFQTDLQLTDINDHAPEFPEKEMLLKIPESTQPGTVFPLKIAQDFDIGSNTVQNYTISPNSHFHVATHNRGDGRKYPELVLDKALDREERPELSLTLTALDGGAPPRSGTTTIRIVVLDNNDNAPEFLQSFYEVQVPENSPLNSLVVVVSARDLDAGAYGSVAYALFQGDEVTQPFVIDEKTAEIRLKRALDFEATPYYNVEIVATDGGGLSGKCTVAIEVVDVNDNAPELTMSTLSSPTPENAPETVVAVFSVSDPDSGDNGRMICSIQNDLPFLLKPTLKNFYTLVTQRTLDRESQAEYNITITVTDMGTPRLKTEHNITVLVSDVNDNAPAFTQTSYTLFVRENNSPALHIGSVSATDRDSGTNAQVTYSLLPPQNPHLRLASLVSINADNGHLFALRSLDYEALQAFEFRVGATDRGSPALSSEALVRVLVLDANDNSPFVLYPLQNGSAPCTELVPRAAEPGYLVTKVVAVDGDSGQNAWLSYQLLKATEPGLFSMWAHNGEVRTARLLSERDAAKHRLVVLVKDNGEPPRSATATLHVLLVDGFSQPYLPLPEAAPAQAQADSLTVYL

SEQ ID NO: 2844 - protein, 688 aa, synthetic construct
  REGION 1..688: note = PCDHB6 (Q9Y5E3) SP+PP+ECD
MMQTKVQNKKRQVAFFILLMLWGEVGSESIQYSVLEETESGTFVANLTKDLGLRVGELASRGARVVFKGNRQHLQFDPQTHDLLLNEKLDREELCGSTEPCVLPFQVLLENPLQFFQASLRVRDINDHAPEFPAREMLLKISEITMPGKIFPLKMAHDLDTGSNGLQRYTISSNPHFHVLTRNRSEGRKFPELVLDKPLDREEQPQLRLTLIALDGGSPPRSGTSEIQIQVLDINDNVPEFAQELYEAQVPENNPLGSLVITVSARDLDAGSFGKVSYALFQVDDVNQPFEINAITGEIRLRKALDFEEIQSYDVDVEATDGGGLSGKCSLVVRVLDVNDNAPELTMSFFISLIPENLPEITVAVFSVSDADSGHNQQVICSIENNLPFLLRPSVENFYTLVTEGALDRESRAEYNITITVTDLGTPRLKTQQSITVQVSDVNDNVPAFTQTSYTLFVRENNSPALHIGSVSATDRDSGINAQVTYSLLPPQDPHLPLSSLVSINADNGHLFALRSLDYEALQSFEFRVGATDRGSPALSSEALVRLLVLDANDNSPFVLYPLQNGSAPCTELVPRAAEPGYLVTKVVAVDGDSGQNAWLSYQLLKATELGLFGVWAHNGEVRTARLLSERDAAKHRLVVLVKDNGEPPRSATATLHVLLVDGFSQPYLPLPEAAPAQAQADSLTVYL

SEQ ID NO: 2845 - protein, 688 aa, synthetic construct
  REGION 1..688: note = PCDHB7 (Q9Y5E2) SP+PP+ECD
MEARVERAVQKRQVLFLCVFLGMSWAGAEPLRYFVAEETERGTFLTNLAKDLGLGVGELRARGTRIVSDQNMQILLLSSLTGDLLLNEKLDREELCGPREPCVLPFQLLLEKPFQIFRAELWVRDINDHAPVFLDREISLKILESTTPGAAFLLESAQDSDVGTNSLSNYTISPNAYFHINVHDSGEGNIYPELVLNQVLDREEIPEFSLTLTALDGGSPPRSGTALVRILVLDVNDNAPDFVRSLYKVQVPENSPVGSMVVSVSARDLDTGSNGEIAYAFSYATERILKTFQINPTSGSLHLKAQLDYEAIQTYTLTIQAKDGGGLSGKCTVVVDVTDINDNRPELLLSSLTSPIAENSPETVVAVFRIRDRDSGNNGKTVCSIQDDVPFILKPSVENFYTLVTEKPLDRERNTEYNITITVTDLGTPRLKTEHNITVLVSDVNDNAPAFTQTSYTLFVRENNSPALPIGSVSATDRDSGTNAQVIYSLLPSQDPHLPLASLVSINADNGHLFALRSLDYEALQAFEFRVGATDRGSPALSSEALVRVLVLDANDNSPFVLYPLQNSSAPCTEPLPRAAEPGYLVTKVVAVDGDSGQNAWLSYQLLKATEPGLFGVWAHNGEVRTARLLSERDAAKQRLVVLVKDNGEPPRSATATLHVLLVDGFSQPYLRLPEAAPDQANSLTVYL

SEQ ID NO: 2846 - protein, 691 aa, synthetic construct
  REGION 1..691: note = PCDHB8 (Q9UN66) SP+PP+ECD
MEASGKLICRQRQVLFSFLLLGLSLAGAAEPRSYSVVEETEGSSFVTNLAKDLGLEQREFSRRGVRVVSRGNKLHLQLNQETADLLLNEKLDREDLCGHTEPCVLRFQVLLESPFEFFQAELQVIDINDHSPVFLDKQMLVKVSESSPPGTAFPLKNAEDLDIGQNNIENYIISPNSYFRVLTRKRSDGRKYPELVLDKALDREEEAELRLTLTALDGGSPPRSGTAQVYIEVVDVNDNAPEFEQPFYRVQISEDSPISFLVVKVSATDVDTGVNGEISYSLFQASDEISKTFKVDFLTGEIRLKKQLDFEKFQSYEVNIEARDAGGFSGKCTVLIQVIDVNDHAPEVTMSAFTSPIPENAPETVVALFSVSDLDSGENGKISCSIQEDLPFLLKSSVGNFYTLLTETPLDRESRAEYNVTITVTDLGTPRLTTHLNMTVLVSDVNDNAPAFTQTSYTLFVRENNSPALHIGSVSATDRDSGTNAQVTYSLLPPQDPHLPLASLVSINTDNGHLFALRSLDYEALQAFEFRVGASDRGSPALSSEALVRVLVLDANDNSPFVLYPLQNGSAPCTELVPRAAEPGYLVTKVVAVDGDSGQNAWLSYQLLKATEPGLFGVWAHNGEVRTARLLSERDAAKQRLVVLVKDNGEPPCSATATLHVLLVDGFSQPYLPLPEAAPAQGQADSLTVYL

SEQ ID NO: 2847 - protein, 690 aa, synthetic construct
  REGION 1..690: note = PCDHB9 (Q9Y5E1) SP+PP+ECD
MKTRGFSFPRQRQVLFLFLFWGVSLAGSGFGRYSVTEETEKGSFVVNLAKDLGLAEGELAARGTRVVSDDNKQYLLLDSHTGNLLTNEKLDREKLCGPKEPCMLYFQILMDDPFQIYRAELRVRDINDHSPVFRHKEMVLKISENTAEGTAFRLERAQDPDEGHNSIQNYTISSNSFFHIKISGSDEGMIYPELVLDKALDREEQEELSLTLTALDGGSPSRSGTSTIRIVVLDVNDNAPQFAQALYETQAPENSPVGSLIVKVSAGDADSGVNAEVSYSFFDASEDILTTFQINPFSGEIFLRELLDYELVNSYKINIQAMDGGGLSARCTVLIKVLDSNDNPPELIISSLSNSVAENSPGIVLAVFKIKDRDSGENGKTICYVQDNLPFFLKPSVDNFYILMTEGALDRESKAEYNITITVTDLGTPRLKTEHSITLQVSDVNDNAPAFTQTSYTLFVRENNSPALHIGSVSATDRDSGTNAQVTYSLLPPQDPHLPLASLVSINADNGHLFALRSLDYEALQAFDFRVGASDRGSPALSSEALVRVLVLDANDNSPFVLYPLQNGSAPCTELVPRAAEPGYLVTKVVAVDGDSGQNAWLSYQLLKATEPGLFGVWAHNGEVRTARLLSERDAAKHRLVVLVKDNGEPPRSATATLHVLLVDGFSQPYLPLPEAAPAQAQADLLTVYL

SEQ ID NO: 2848 - protein, 692 aa, synthetic construct
  REGION 1..692: note = PCDHGA1 (Q9Y5H4) SP+PP+ECD
MKIQKKLTGCSRLMLLCLSLELLLEAGAGNIHYSVPEETDKGSFVGNIAKDLGLQPQELADGGVRIVSRGRMPLFALNPRSGSLITARRIDREELCAQSMPCLVSFNILVEDKMKLFPVEVEIIDINDNTPQFQLEELEFKMNEITTPGTRVSLPFGQDLDVGMNSLQSYQLSSNPHFSLDVQQGADGPQHPEMVLQSPLDREEEAVHHLILTASDGGEPVRSGTLRIYIQVVDANDNPPAFTQAQYHINVPENVPLGTQLLMVNATDPDEGANGEVTYSFHNVDHRVAQIFRLDSYTGEISNKEPLDFEEYKMYSMEVQAQDGAGLMAKVKVLIKVLDVNDNAPEVTITSVTTAVPENFPPGTIIALISVHDQDSGDNGYTTCFIPGNLPFKLEKLVDNYYRLVTERTLDRELISGYNITITAIDQGTPALSTETHISLLVTDINDNSPVFHQDSYSAYIPENNPRGASIFSVRAHDLDSNENAQITYSLIEDTIQGAPLSAYLSINSDTGVLYALRSFDYEQFRDMQLKVMARDSGDPPLSSNVSLSLFLLDQNDNAPEILYPALPTDGSTGVELAPLSAEPGYLVTKVVAVDRDSGQNAWLSYRLLKASEPGLFSVGLHTGEVRTARALLDRDALKQSLVVAVQDHGQPPLSATVTLTVAVADRISDILADLGSLEPSAKPNDSDLTLY

SEQ ID NO: 2849 - protein, 696 aa, synthetic construct
  REGION 1..696: note = PCDHGA10 (Q9Y5H3) SP+PP+ECD
MAAQRNRSKESKDCSGLVLLCLFFGIPWEAGARQISYSIPEELEKGSFVGNISKDLGLAPRELAERGVRIVSRGRTQLFSLNPRSGSLITAGRIDREELCAQSARCVVSFNILVEDRVKLFGIEIEVTDINDNAPKFQAENLDVKINENVAAGMRFPLPEAIDPDVGVNSLQSYQLSPNKHFSLRVQSRANGVKYPELVLEHSLDREEEAIHHLVLTASDGGDPLRSGTVLVSVTVFDANDNAPVFTLPEYRVSVPENLPVGTQLLTVTATDRDEGANGEVTYSFRKLPDTQLLKFQLNKYTGEIKISENLDYEETGFYEIEIQAEDGGAYLATAKVLITVEDVNDNSPELTITSLFSPVTEDSPLGTVVALLNVHDLDSEQNGQVTCSILAYLPFKLEKSIDSYYRLVIHRALDREQVSSYNITVTATDGGSPPLSTEAHFMLQVADINDNPPTFSQVSYFTYIPENNARGASIFSVTALDPDSKENAQIIYSLAEDTIQGVPLSSYISINSDTGVLYALRSFDYEQFHELQMQVTASDSGDPPLSSNVSLSLFVLDQNDNAPEILYPALPTDGSTGVELAPRSAEPGYLVTKVVAVDRDSGQNAWLSYRLLKASEPGLFAVGEHTGEVRTARALLDRDALKQSLVVAVQDHGQPPLSATVTLTVAVADSIPQVLADLGSFESPANSETSDLTLY

SEQ ID NO: 2850 - protein, 693 aa, synthetic construct
  REGION 1..693: note = PCDHGA11 (Q9Y5H2) SP+PP+ECD
MANRLQRGDRSRLLLLLCIFLGTLRGFRARQIRYSVPEETEKGSFVGNISKDLGLEPRELAKRGVRIVSRGKTQLFAVNPRSGSLITAGRIDREELCETVSSCFLNMELLVEDTLKIYGVEVEIIDINDNAPSFQEDEVEIKVSEHAIPGARFALPNARDPDVGVNSLQSYQLSPNNYFSLQLRGRTDGAKNPELVLEGSLDREKEAAHLLLLTALDGGDPIRKGAVPIRVVVLDVNDHIPMFTQSVYRVSVPENISSGTRVLMVNATDPDEGINGEVMYSFRNMESKASEIFQLDSQTGEVQVRGSLDFEKYRFYEMEIQGQDGGGLFTTTTMLITVVDVNDNAPEITITSSINSILENSPPGTVIALLNVQDQDSGENGQVSCFIPNHLPFKLEKTYGNYYKLITSRVLDRELVQSYNITLTATDQGSPPLSAETHVWLNVADDNDNPPVFPHSSYSAYIPENNPRGASIFSVTALDPDSKQNALVTYSLTDDTVQGVPLSSYVSINSNTGVLYALQSFDYEQFRDLELRVIARDSGDPPLSSNVSLSLFVLDQNDNAPEILYPALPTDGSTGVELAPRSAEPGYLVTKVVAVDKDSGQNAWLSYRLLKASEPGLFAVGEHTGEVRTARALLDRDALKQSLVVAVQDHGQPPLSATVTLTVAVADSIPEVLADLGSLESLANSETSDLSLY

SEQ ID NO: 2851 - protein, 692 aa, synthetic construct
  REGION 1..692: note = PCDHGA12 (O60330) SP+PP+ECD
MIPARLHRDYKGLVLLGILLGTLWETGCTQIRYSVPEELEKGSRVGDISRDLGLEPRELAERGVRIIPRGRTQLFALNPRSGSLVTAGRIDREELCMGAIKCQLNLDILMEDKVKIYGVEVEVRDINDNAPYFRESELEIKISENAATEMRFPLPHAWDPDIGKNSLQSYELSPNTHFSLIVQNGADGSKYPELVLKRALDREEKAAHHLVLTASDGGDPVRTGTARIRVMVLDANDNAPAFAQPEYRASVPENLALGTQLLVVNATDPDEGVNAEVRYSFRYVDDKAAQVFKLDCNSGTISTIGELDHEESGFYQMEVQAMDNAGYSARAKVLITVLDVNDNAPEVVLTSLASSVPENSPRGTLIALLNVNDQDSEENGQVICFIQGNLPFKLEKSYGNYYSLVTDIVLDREQVPSYNITVTATDRGTPPLSTETHISLNVADTNDNPPVFPQASYSAYIPENNPRGVSLVSVTAHDPDCEENAQITYSLAENTIQGASLSSYVSINSDTGVLYALSSFDYEQFRDLQVKVMARDNGHPPLSSNVSLSLFVLDQNDNAPEILYPALPTDGSTGVELAPRSAEPGYLVTKVVAVDRDSGQNAWLSYRLLKASEPGLFSVGLHTGEVRTARALLDRDALKQSLVVAVQDHGQPPLSATVTLTVAVADSIPQVLADLGSLESPANSETSDLTLY

SEQ ID NO: 2852 - protein, 692 aa, synthetic construct
  REGION 1..692: note = PCDHGA2 (Q9Y5H1) SP+PP+ECD
MAALQKLPHCRKLVLLCFLLATLWEARAGQIRYSVREEIDRGSFVGNIAKDLGLEPLALAEQGVRIVSRGRSQLFALNPRSGSLVTANRIDREELCAQSAPCLLNFNILLEDKLTIYSVEVEITDINDNAPRFGVEELELKISETTTPGFRIPLKNAHDADVGENALQKYALNPNDHFSLDVRRGADGNKYPELVLERSLDREEEAVHHLVLVASDGGDPVLSGTSRICVKVLDANDNAPVFTQPEYRISIPENTLVGTRILTVTATDADEGYYAQVVYFLEKSPGETSEVFELKSTSGELTIIKDLDYEDATFHEIDIEAQDGPGLLTRAKVIVTVLDVNDNAPEFYMTSATSSVSEDSLPGTIIGLFNVHDRDSGQNAFTTCSLPEDLPFKLEKSVDNYYRLVTTRALDREQFSFYNITLTAKDGGNPSLSTDAHILLQVADINDNAPAFSRTSYSTYIPENNPRGASVFSVTAHDPDSNDNAHVTYSFAEDTVQGAPLSSYISINSDTGVLYALRSFDYEQLRDLQVWVIARDSGNPPLSSNVSLSLFVLDQNDNAPEILYPAFPTDGSTGVELAPRSAEPGYLVTKVVAVDRDSGQNAWLSYHLLKASEPGLFSVGLHTGEVRTARALLDRDALKQSLVVAIQDHGQPPLSATVTLTVAVADRIPDILADLGSLEPSAIPNDSDLTLY

SEQ ID NO: 2853 - protein, 692 aa, synthetic construct
  REGION 1..692: note = PCDHGA3 (Q9Y5H0) SP+PP+ECD
MTNCLSFRNGRGLALLCALLGTLCETGSGQIRYSVSEELDKGSFVGNIANDLGLEPRELAERGVRIVSRGRTQLFSLNPQSGSLVTAERIDREELCAQIPLCLVKINILVEDKLKIFEVEIEIKDINDNAPNFPTEELEIKIGELTVPGTRFPIKTAFDPDVGINSLQNYKLSPNDYFSLAVNSVSEGAKYPELVLERALDREKKEIHQLVLVASDGGDPVHSGNLHIQVIVLDANDNPPMFTQPEYRVSVWENVPVGTRLLTVNATDPDEGFNAQVSYILDKMPGKIAEIFHLNSVSGEVSILKSLDYEDAMFYEIKIEAQDGPGLLSRAKILVTVLDVNDNAPEITITSLTSSVPEEGTVGREIALIDVHDRDSGQNGQVEVFVLGNLPFKLEKSIDQYYRLVTATSLDREQISEYNISLRASDGGSPPLSTETHITLHVIDINDNPPTFPHLSYSAYIPENNPRGASIFSVTAQDPDSNNNARITYALTEDTLQGAPLSSFVSINSNTGVLYALRSFDYEQFRDLKLLVTASDSGNPPLSSNVSLNLFVLDQNDNAPEILYPALPTDGSTGVELAPRSAEPGYLVTKVVAVDRDSGQNAWLSYRLLKASEPGLFSVGLHTGEVRTARALLDRDALKQSLVVAVQDHGQPPLSATVTLTVAVADRIPDILADLGSLEPSAKPNDSDLTLY

SEQ ID NO: 2854 - protein, 723 aa, synthetic construct
  REGION 1..723: note = PCDHGA4 (Q9Y5G9) SP+PP+ECD
MHFILDPEDPGAPQASTEGKPKHRRLRGGVVMAAPPARPDHTRLLQICLLLGVLVEIRAEQILYSVFEEQEEGSVVGNIAKDLGLAPRELAERGVRIVSRGRTQLFALNPRSGTLVTAGRIDREELCDRSPNCVTNLEILLEDTVKILRVEVEIIDVNDNPPSFGTEQREIKVAENENPGARFPLPEAFDPDVGVNSLQGYQLNSNGYFSLDVQSGADGIKYPELVLERALDREEEAVHHLVLTAFDGGDPVRSGTARILIILVDTNDNAPVFTQPEYHVSVRENVPVGTRLLTVKATDPDEGANGDVTYSFRKVRDKISQLFQLNSLSGDITILGGLDYEDSGFYDIDVEAHDGPGLRARSKVLVTVLDENDNAPEVTVTSLTSSVQESSSPGTVIALFNVHDSDSGGNGLVTCSIPDNLPFTLEKTYGNYYRLLTHRTLDREEVSEYNITVTATDQGTPPLSTETHISLQVMDINDNPPTFPHASYSAYIPENNPRGASILSMTAQDPDSGDNARITYSLAEDTFQGAPLSSYVSINSNTGILYALCSFDYEQFRDLQLLMTASDSGDPPLSSNVSLSLFVLDQNDNVPEILYPTFPTDGSTGVELAPRSADSGYLVTKVVAVDRDSGQNAWLSYSLLKSSEPGLFAVGLHTGEVRTARALLDRDALKQRLVVVVQDHGQPPLSATVTLTVAVADSIPDVLADLGSLKPSADPDDSGLTLY

SEQ ID NO: 2855 - protein, 692 aa, synthetic construct
  REGION 1..692: note = PCDHGA5 (Q9Y5G8) SP+PP+ECD
MASPPRGWGCGELLLPFMLLGTLCEPGSGQIRYSMPEELDKGSFVGNIAKDLGLEPQELAERGVRIVSRGRTQLFALNPRSGSLVTAGRIDREELCAQSPLCVVNFNILVENKMKIYGVEVEIIDINDNFPRFRDEELKVKVNENAAAGTRLVLPFARDADVGVNSLRSYQLSSNLHFSLDVVSGTDGQKYPELVLEQPLDREKETVHDLLLTALDGGDPVLSGTTHIRVTVLDANDNAPLFTPSEYSVSVPENIPVGTRLLMLTATDPDEGINGKLTYSFRNEEEKISETFQLDSNLGEISTLQSLDYEESRFYLMEVVAQDGGALVASAKVVVTVQDVNDNAPEVILTSLTSSISEDCLPGTVIALFSVHDGDSGENGEIACSIPRNLPFKLEKSVDNYYHLLTTRDLDREETSDYNITLTVMDHGTPPLSTESHIPLKVADVNDNPPNFPQASYSTSVTENNPRGVSIFSVTAHDPDSGDNARVTYSLAEDTFQGAPLSSYVSINSDTGVLYALRSFDYEQLRDLQLWVTASDSGNPPLSSNVSLSLFVLDQNDNTPEILYPALPTDGSTGVELAPRSAEPGYLVTKVVAVDKDSGQNAWLSYRLLKASEPGLFAVGLHTGEVRTARALLDRDALKQSLVVAVEDHGQPPLSATFTVTVAVADRIPDILADLGSIKTPIDPEDLDLTLY

SEQ ID NO: 2856 - protein, 692 aa, synthetic construct
  REGION 1..692: note = PCDHGA6 (Q9Y5G7) SP+PP+ECD
MAPPQRHPQRSEQVLLLTLLGTLWGAAAAQIRYSIPEELEKGSFVGNIVKDLGLEPQELAEHGVRIVSRGRMQLFSLNPRNGSLVTAGRIDREELCAQSPRCLVSFNILVEDKLNLYPVEVEIVDINDNTPRFLKEELEVKILENAAPSSRFPLMEVYDPDVGMNSLQGFKLSGNSHFSVDVQSEAHGPKYPELVLEGTLDREGEAVYRLVLTAMDGGDPVRSSVAQILVTVLDVNDNTPMFTQPVYRVSVPENLPVGTPVLAVTATDQDEGVHGEVTYSFVKITEKISQIFCLNVLTGEISTSANLDYEDSSFYELGVEARDGPGLRDRAKVLITILDVNDNVPEVVVTSGSRTIAESAPPGTVIALFQVFDRDSGLNGLVTCSIPRSLPFELEKSVGNYYRLVTNAALDREEVFLYNITVTATDKGTPPLSTETIISLNVADTNDNPPTFPHSSYSVYVLENNPRGASIFSVNALDPDVDQNAQVSYSLAEDTLQGAPLSSYVSINSDTGILYALRSFDYEQLRDLQLWVTASDSGDPPLSSNVSLSLFVLDQNDNAPEILYPALPTDGSTGVELAPRSAEPGYLVTKVVAVDRDSGQNAWLSYRLLKASEPGLFSVGLHTGEVRTARALLDRDALKQSLVVAVQDHGQPPLSATVTLTVAVADRIPDILADLGSLEPSAKPNDSDLTLY

SEQ ID NO: 2857 - protein, 692 aa, synthetic construct
  REGION 1..692: note = PCDHGA7 (Q9Y5G6) SP+PP+ECD
MAAQPRGGDYRGFFLLSILLGTPWEAWAGRILYSVSEETDKGSFVGDIAKDLGLEPRELAERGVRIISRGRTQLFALNQRSGSLVTAGRIDREEICAQSARCLVNFNILMEDKMNLYPIDVEIIDINDNVPRFLTEEINVKIMENTAPGVRFPLSEAGDPDVGTNSLQSYQLSPNRHFSLAVQSGDDETKYPELVLERVLDREEERVHHLVLTASDGGDPPRSSTAHIQVTVVDVNDHTPVFSLPQYQVTVPENVPVGTRLLTVHAIDLDEGVNGEVTYSFRKITPKLPKMFHLNSLTGEISTLEGLDYEETAFYEMEVQAQDGPGSLTKAKVLITVLDVNDNAPEVTMTSLSSSIPEDTPLGTVIALFYLQDRDSGKNGEVTCTIPENLPFKLEKSIDNYYRLVTTKNLDRETLSLYNITLKATDGGTPPLSRETHIFMQVADTNDNPPTFPHSSYSVYIAENNPRGASIFLVTAQDHDSEDNAQITYSLAEDTIQGAPVSSYVSINSDTGVLYALQSFDYEQLRELQLRVTAHDSGDPPLSSNMSLSLFVLDQNDNPPEILYPALPTDGSTGMELAPRSAEPGYLVTKVVAVDKDSGQNAWLSYLLLKASEPGLFAVGLYTGEVRTARALLDRDALKQSLVVAVQDHGQPPLSATVTLTVAVADSIPEVLADLGSLEPSDGPYNYDLTLY

SEQ ID NO: 2858 - protein, 692 aa, synthetic construct
  REGION 1..692: note = PCDHGA8 (Q9Y5G5) SP+PP+ECD
MAAPQSRPRRGELILLCALLGTLWEIGRGQIRYSVPEETDKGSFVGNISKDLGLDPRKLAKHGVRIVSRGRTQLFALNPRSGSLITAGRIDREELCAQSPRCLININTLVEDKGKLFGVEIEIIDINDNNPKFQVEDLEVKINEIAVPGARYPLPEAVDPDVGVNSLQSYQLSPNHHFSLDVQTGDNGAINPELVLERALDREEEAAHHLVLTASDGGKPPRSSTVRIHVTVLDTNDNAPVFPHPIYRVKVLENMPPGTRLLTVTASDPDEGINGKVAYKFRKINEKQTPLFQLNENTGEISIAKSLDYEECSFYEMEIQAEDVGALLGRTKLLISVEDVNDNRPEVIITSLFSPVLENSLPGTVIAFLSVHDQDSGKNGQVVCYTRDNLPFKLEKSIGNYYRLVTRKYLDRENVSIYNITVMASDLGTPPLSTETQIALHVADINDNPPTFPHASYSAYILENNLRGASIFSLTAHDPDSQENAQVTYSVTEDTLQGAPLSSYISINSDTGVLYALQSFDYEQIRDLQLLVTASDSGDPPLSSNMSLSLFVLDQNDNAPEILYPALPTDGSTGVELAPRSAERGYLVTKVVAVDRDSGQNAWLSYRLLKASEPGLFSVGLHTGEVRTARALLDRDALKQSLVVAVQDHGQPPLSATVTLTVAVADSIPEVLTELGSLKPSVDPNDSSLTLY

SEQ ID NO: 2859 - protein, 692 aa, synthetic construct
  REGION 1..692: note = PCDHGA9 (Q9Y5G4) SP+PP+ECD
MAAPTKCQLRGRLVLLCSLLGMLWEARASQIRYSVPEETEKGYIVGNISKDLALEPRELAERRVRIVSRGRTQLFSLNPRSGTLVTAGRIDREELCAQSPRCLVNFKVLVEDRVKLYGIEIEVTDINDSAPKFQAESLEVKINEIAVPGARYPLPEAIDPDVGVNSLQSYQLSPNHHFSLNVQTGDNGAINPELVLERALDREEATAHHLVLTASDGGEPRRSSTVRIHVTVLDTNDNAPVFAQRIYRVKVLENVPPGTWLLTATASDLDEGINGKVAYKFWKINEKQSLLFQLNENTGEISTAKSLDYEECSFYEMEIQAEDGGGLKGWTKVLISVEDVNDNRPEVTITSLFSPVREDAPQGTVILLFNAHDRDSGKNGQVVCSIQENLSFTLENSEEDYYRLLTAQILDREKASEYNITVTATDRGTPPLSTEIHITLQVTDINDNPPAFSQASYSVYLPENNARGTSIFSVIAYDPDSNENSRVIYSLAEDTIQGSPLSTYVSINSDTGVLYALCSFDYEQFRDLQMQVTASDSGSPPLSSNVSLRLFVLDQNDNAPEILYPALPTDGSTGVELAPRSAEPGYLVTKVVAVDRDSGQNAWLSYRLFKASEPGLFSVGLHTGEVRTARALLDRDALKQSLVVAVQDHGQPPLSATVTLTVAIADSIPDILADLGSLQIPADLEASDLTLY

SEQ ID NO: 2860 - protein, 687 aa, synthetic construct
  REGION 1..687: note = PCDHGB1 (Q9Y5G3) SP+PP+ECD
MQRAREAEMMKSQVLFPFLLSLFCGAISQQIRYTIPEELANGSRVGKLAKDLGLSVRELPTRKLRVSAEDYFNVSLESGDLLVNGRIDREKICGRKLECALEFETVAENPMNVFHVVVVIQDINDNAPRFVAKGIDLEICESALPGVKFSLDSAQDADVEGNSLKLYTINPNQYFSLSTKESPDGSKYPVLLLEKPLDREHQSSHRLILTAMDGGDPPLSGTTHIWIRVTDANDNAPVFSQEVYRVSLQENVPWGTSVLRVMATDQDEGINAEITYAFLNSPISTSLFNLNPNTGDITTNGTLDFEETSRYVLSVEAKDGGVHTAHCNVQIEIVDENDNAPEVTFMSFSNQIPEDSDLGTVIALIKVRDKDSGQNGMVTCYTQEEVPFKLESTSKNYYKLVIAGALNREQTADYNVTIIATDKGKPALSSRTSITLHISDINDNAPVFHQASYVVHVSENNPPGASIAQVSASDPDLGPNGRVSYSILASDLEPRELLSYVSVSPQSGVVFAQRAFDHEQLRAFELTLQARDQGSPALSANVSLRVLVGDLNDNAPRVLYPALGPDGSALFDMVPRAAEPGYLVTKVVAVDADSGHNAWLSYHVLQASEPGLFSLGLRTGEVRTARALGDRDAARQRLLVAVRDGGQPPLSATATLHLIFADSLQEVLPDLSDRPEPSDPQTELQFY

SEQ ID NO: 2861 - protein, 691 aa, synthetic construct
  REGION 1..691: note = PCDHGB2 (Q9Y5G2) SP+PP+ECD
MKASSGRCGLVRWLQVLLPFLLSLFPGALPVQIRYSIPEELAKNSVVGNLAKDLGLSVRDLPARKLRVSAEKEYFTVNPESGDLLVSDRIDREQICGKQPLCVLDFDTVAENPLNIFYIAVIVQDINDNTPLFKQTKINLKIGESTKPGTTFPLDPALDSDVGPNSLQRYHLNDNEYFDLAEKQTPDGRKYPELILKHSLDREEHSLHQLVLTAVDGGDPPQSGTTQIRIKVTDANDNPPVFSQDVYRVTLREDVPPGFFVLQVTATDRDEGINAEITYSFHNVDEQVKHFFNLNEKTGEITTKDDLDFEIASSYTLSIEAKDPGDLAAHCSIQVEILDDNDCAPEVIVTSVSTPLPEDSPPGTVIALIKTRDRDSGENGEVYCQVLGNAKFILKSSSKNYYKLVTDGALDREEIPEYNLTITATDGGKPPLSSSIIVTLHISDVNDNAPVFQQTSYMVHVAENNPPGASIAQISASDPDLGPSGQVSYSIVASDLKPREILSYVSVSAQSGVVFAQRAFDHEQLRAFELTLQARDQGSPALSANVSLRVLVGDLNDNAPRVLYPALGPDGSALFDMVPRAAEPGYLVTKVVAVDADSGHNAWLSYHVLQASEPGLFSLGLRTGEVRTARALGDRDAARQRLLVAVRDGGQPPLSATATLHLIFADSLQEVLPDLSDRREPSDPQAKLQFY

SEQ ID NO: 2862 - protein, 691 aa, synthetic construct
  REGION 1..691: note = PCDHGB3 (Q9Y5G1) SP+PP+ECD
MGNSSGWRGPAGQRRMLFLFLLSLLDQALSEPIRYAIPEELDRGSLVGNLAKDLGFGVGDLPTRNLRVIAEKKFFTVSPENGNLLVSDRIDREEICGKKSTCVLEFEMVAEKPLNFFHVTVLIQDINDNPPTFSQNITELEISELALTGATFALESAQDPDVGVNSLQQYYLSPDPHFSLIQKENLDGSRYPELVLKAPLDREEQPHHHLVLTAVDGGEPSRSCTTQIRVIVADANDNPPVFTQDMYRVNVAENLPAGSSVLKVMAIDMDEGINAEIIYAFINIGKEVRQLFKLDSKTGELTTIGELDFEERDSYTIGVEAKDGGHHTAYCKVQIDISDENDNAPEITLASESQHIQEDAELGTAVALIKTHDLDSGFNGEILCQLKGNFPFKIVQDTKNTYRLVTDGALDREQIPEYNVTITATDKGNPPLSSSKTITLHILDVNDNVPVFHQASYTVHVAENNPPGASIAHVRASDPDLGPNGLVSYYIVASDLEPRELSSYVSVSARSGVVFAQRAFDHEQLRAFELTLQARDQGSPTLSANVSLRVLVDDRNDNAPLVLYPALGPEGSALFDMVPRSAEPGYLVTKVVAVDADSGYNAWLSYHIVQASEPGLFSLGLRTGEVRTARTLGDREAARQRLLVTVRDGGQQPLSATVMLHLIFADSLQEIQPDLSDRPTPSDPQAELQFH

SEQ ID NO: 2863 - protein, 689 aa, synthetic construct
  REGION 1..689: note = PCDHGB4 (Q9UN71) SP+PP+ECD
MGSGAGELGRAERLPVLFLFLLSLFCPALCEQIRYRIPEEMPKGSVVGNLATDLGFSVQELPTRKLRVSSEKPYFTVSAESGELLVSSRLDREEICGKKPACALEFEAVAENPLNFYHVNVEIEDINDHTPKFTQNSFELQISESAQPGTRFILGSAHDADIGSNTLQNYQLSPSDHFSLINKEKSDGSKYPEMVLKTPLDREKQKSYHLTLTALDFGAPPLSSTAQIHVLVTDANDNAPVFSQDVYRVSLSENVYPGTTVLQVTATDQDEGVNAEITFSFSEASQITQFDLNSNTGEITVLNTLDFEEVKEYSIVLEARDGGGMIAQCTVEVEVIDENDNAPEVIFQSLPNLIMEDAELGTHIALLKVRDKDSRHNGEVTCKLEGDVPFKILTSSRNTYKLVTDAVLDREQNPEYNITVTATDRGKPPLSSSSSITLHIGDVNDNAPVFSQSSYIVHVAENNPPGASISQVRASDPDLGPNGQVSYCIMASDLEQRELSSYVSISAESGVVFAQRAFDHEQLRAFELTLQARDQGSPALSANVSLRVLVDDRNDNAPRVLYPALGPDGSALFDMVPHAAEPGYLVTKVVAVDADSGHNAWLSYHVLQASEPGLFSLGLRTGEVRTARALGDRDAVRQRLLVAVRDGGQPPLSATATLHLVFADSLQEVLPDITDRPDPSDLQAELQFY

SEQ ID NO: 2864 - protein, 687 aa, synthetic construct
  REGION 1..687: note = PCDHGB5 (Q9Y5G0) SP+PP+ECD
MGSGAGELGRAERLPVLFLFLLSLFCPALCEQIRYRIPEEMPKGSVVGNLATDLGFSVQELPTRKLRVSSEKPYFTVSAESGELLVSSRLDREEICGKKPACALEFEAVAENPLNFYHVNVEIEDINDHTPKFTQNSFELQISESAQPGTRFILEVAEDADIGLNSLQKYKLSLNPSFSLIIKEKQDGSKYPELALEKTLDREQQSYHRLVLTALDGGHPPLSGTTELRIQVTDANDNPPVFNRDVYRVSLRENVPPGTTVLQVSATDQDEGINSEITYSFYRTGQIFSLNSKSGEITTQKKLDFEETKEYSMVVEGRDGGGLVAQCTVEINIQDENDNSPEVTFHSLLEMILENAVPGTLIALIKIHDQDSGENGEVNCQLQGEVPFKIISSSKNSYKLVTDGTLDREQTPEYNVTITATDRGKPPLSSSISVILHIRDVNDNAPVFHQASYLVSVPENNPPGASIAQVCASDLDLGLNGQVSYSIMASDLEPLALASYVSMSAQSGVVFAQRAFDYEQLRTFELTLQARDQGSPALSANVSLRVLVGDRNDNAPRVLYPALGPDGSALFDMVPRAAEPGYLVTKVVAVDADSGHNAWLSYHVLQASEPGLFSLGLRTGEVRTARALGDRDAARQRLLVAVRDGGQPPLSATATLHLVFADSLQEVLPDITDRPVPSDPQAELQFY

SEQ ID NO: 2865 - protein, 691 aa, synthetic construct
  REGION 1..691: note = PCDHGB6 (Q9Y5F9) SP+PP+ECD
MGGSCAQRRRAGPRQVLFPLLLPLFYPTLSEPIRYSIPEELAKGSVVGNLAKDLGLSVLDVSARKLRVSAEKLHFSVDAESGDLLVKNRIDREQICKERRRCELQLEAVVENPLNIFHVIVVIEDVNDHAPQFDKKEIHLEIFESASAGTRLSLDPATDPDININSIKDYKINSNPYFSLMVRVNSDGGKYPELSLEKLLDREEQRSHSLILTALDGGDPPRSATAHIEISVKDTNDNPPVFSRDEYRISLSENLPPGSPVLQVTATDQDEGVNAEINYYFRSTAQSTKHMFSLDEKTGMIKNNQSFDFEDVERYTMEVEAKDGGGLSTQCKVIIEILDENDNSPEIIITSLSDQILENSPPGMVVALFKTRDLDFGGNGEVRCNIETDIPFKIYSSSNNYYKLVTDGALDREQTPEYNVTIVATDRGKPPLSSSRSITLYVADINDNAPVFDQTSYVVHVAENNPPGASIAQVSASDPDLGLNGHISYSIVASDLEPLAVSSYVSVSAQSGVVFAQRAFDHEQLRAFALTLQARDHGSPTLSANVSLRVLVGDRNDNAPRVLYPALGPDGSAFFDMVPRSAEPGYLVTKVVAVDADSGHNAWLSYHVLQASEPGLFSLGLRTGEVRTARALGDRDAARQRLLVAVRDGGQPPLSATATLHLVFADNLQEILPDLSDRPVLSDPQAELQFY

SEQ ID NO: 2866 - protein, 691 aa, synthetic construct
  REGION 1..691: note = PCDHGB7 (Q9Y5F8) SP+PP+ECD
MGGSCAQRRRAGPRQVLFPLLLPLFYPTLCEPIRYSIPEELAKGSVVGNLAKDLGLSVLDVSARELRVSAEKLHFSVDAQSGDLLVKDRIDREQICKERRRCELQLEAVVENPLNIFHVIVVIEDVNDHAPQFRKDEINLEISESVSLGMGTILESAEDPDISMNSLSKYQLSPNEYFSLVEKDNPDGGKYPELVLQKTLDRETQSAHHLVLTALDGGDPPRSGTAQIRILVIDANDNPPVFSQDVYRVSLREDVPPGTSILRVKATDQDEGINSEITYSFFGVADKAQHVFSLDYTTGNILTQQPLDFEEVERYTINIEAKDRGSLSTRCKVIVEVVDENDNSPEIIITSLSDQIMEDSPPGVVVALFKTRDQDSGENGEVRCSLSRGVPFKIHSSSNNYYKLVTDEALDREQTPEYNVTIAATDRGKPPLSSSKTITLHITDVNDNAPVFGQSAYLVHVPENNQPGASIAQVSASDPDFGLNGRVSYSLIASDLESRTLSSYVSVSAQSGVVFAQRAFDHEQLRTFELTLQARDQGSPALSANVSLRVLVGDRNDNAPRVLYPALGPDGSALFDTVPRAAQPGYLVTKVVAVDADSGHNAWLSYHVVQASEPGLFSLGLRTGEVRMVRALGDKDSVRQRLLVAVRDGGQPPLSATATLHLVFADSLQEVLPDFSDHPTPSDSQAEMQFY

SEQ ID NO: 2867 - protein, 693 aa, synthetic construct
  REGION 1..693: note = PCDHGC3 (Q9UN70) SP+PP+ECD
MVPEAWRSGLVSTGRVVGVLLLLGALNKASTVIHYEIPEEREKGFAVGNVVANLGLDLGSLSARRFRVVSGASRRFFEVNRETGEMFVNDRLDREELCGTLPSCTVTLELVVENPLELFSVEVVIQDINDNNPAFPTQEMKLEISEAVAPGTRFPLESAHDPDVGSNSLQTYELSRNEYFALRVQTREDSTKYAELVLERALDREREPSLQLVLTALDGGTPALSASLPIHIKVLDANDNAPVFNQSLYRARVLEDAPSGTRVVQVLATDLDEGPNGEIIYSFGSHNRAGVRQLFALDLVTGMLTIKGRLDFEDTKLHEIYIQAKDKGANPEGAHCKVLVEVVDVNDNAPEITVTSVYSPVPEDAPLGTVIALLSVTDLDAGENGLVTCEVPPGLPFSLTSSLKNYFTLKTSADLDRETVPEYNLSITARDAGTPSLSALTIVRVQVSDINDNPPQSSQSSYDVYIEENNLPGAPILNLSVWDPDAPQNARLSFFLLEQGAETGLVGRYFTINRDNGIVSSLVPLDYEDRREFELTAHISDGGTPVLATNISVNIFVTDRNDNAPQVLYPRPGGSSVEMLPRGTSAGHLVSRVVGWDADAGHNAWLSYSLLGSPNQSLFAIGLHTGQISTARPVQDTDSPRQTLTVLIKDNGEPSLSTTATLTVSVTEDSPEARAEFPSGSAPREQKKNLTFY

SEQ ID NO: 2868 - protein, 692 aa, synthetic construct
  REGION 1..692: note = PCDHGC4 (Q9Y5F7) SP+PP+ECD
MLRKVRSWTEIWRWATLLFLFYHLGYVCGQIRYPVPEESQEGTFVGNVAQDFLLDTDSLSARRLQVAGEVNQRHFRVDLDSGALLIKNPIDREALCGLSASCIVPLEFVTEGPLEMYRAEVEIVDVNDHAPRFPRQQLDLEIGEAAPPGQRFPLEKAQDADVGSNSISSYRLSSNEHFALDVKKRSDGSLVPELLLEKPLDREKQSDYRLVLTAVDGGNPPRSGTAELRVSVLDVNDNAPAFQQSSYRISVLESAPAGMVLIQLNASDPDLGPSGNVTFYFSGHTPDRVRNLFSLHPTTGKLTLLGPLDFESENYYEFDVRARDGGSPAMEQHCSLRVDLLDVNDNAPYITVTSELGTLPESAEPGTVVALISVQDPDSGSNGDVSLRIPDHLPFALKSAFRNQFSLVTAGPLDREAKSSYDIMVTASDAGNPPLSTHRTIFLNISDVNDNPPSFFQRSHEVFVPENNRPGDLLCSLAASDPDSGLNALISYSLLEPRNRDVSASSFISLNPQTGAVHATRSFDYEQTQTLQFEVQARDRGNPPLSSTVTVRLFVLDLNDNAPAVLRPRARPGSLCPQALPPSVGAGHLITKVTAVDLDSGYNAWVSYQLLEAPDPSLFAVSRYAGEVRTAVPIPADLPPQKLVIVVKDSGSPPLSTSVTLLVSLEEDTHPVVPDLRESSAPREGESRLTLY

SEQ ID NO: 2869 - protein, 693 aa, synthetic construct
  REGION 1..693: note = PCDHGC5 (Q9Y5F6) SP+PP+ECD
MGPKTLPQLAGKWQVLCMLSLCCWGWVSGQLRYSVVEESEPGTLVGNVAQDLGLKMTDLLSRRLQLGSEENGRYFSLSLMSGALAVNQKIDRESLCGASTSCLLPVQVVTEHPLELIRVEVEILDLNDNSPSFATPEREMRISESAASGARFPLDSAQDPDVGTNTVSFYTLSPNSHFSLNVKTLKDGKPFPELVLEQQLDREAQARHQLVLTAVDGGTPARSGTTLISVIVLDINDNAPTFQSSVLRVGIPENAPIGTLLLRLNATDPDEGTNGQLDYSFGDHTSEAVRNLFGLDPSSGAIHVLGPIDFEESRFYEIHARARDQGQPAMEGHCVIQVDVGDVNDNAPEVLLASLANPVLESTPVGTVVGLFNVRDRDSGRNGEVSLDISPDLPFQIKPSENHYSLLTSQPLDREATSHYIIELLASDAGSPSLHKHLTIRLNISDVNDNAPRFNQQLYTAYILENRPPGSLLCTVAASDPDTGDNARLTYSIVGNQVQGAPASSFVYVNPEDGRIFAQRTFDYELLQMLQIVVGVRDSGSPPLHANTSLHVFVLDENDNAPAVLHPRPDWEHSAPQRLPRSAPPGSLVTKVTAVDADAGHNAWLSYSLLPQSTAPGLFLVSTHTGEVRTARALLEDDSDTQQVVVLVRDNGDPSLSSTATVLLVLEDEDPEEMPKSSDFLIHPPERSDLTLY

SEQ ID NO: 2870 - protein, 1743 aa, synthetic construct
  REGION 1..1743: note = PCSK5 (Q92824) SP+PP+ECD
MGWGSRCCCPGRLDLLCVLALLGGCLLPVCRTRVYTNHWAVKIAGGFPEANRIASKYGFINIGQIGALKDYYHFYHSRTIKRSVISSRGTHSFISMEPKVEWIQQQVVKKRTKRDYDFSRAQSTYFNDPKWPSMWYMHCSDNTHPCQSDMNIEGAWKRGYTGKNIVVTILDDGIERTHPDLMQNYDALASCDVNGNDLDPMPRYDASNENKHGTRCAGEVAAAANNSHCTVGIAFNAKIGGVRMLDGDVTDMVEAKSVSFNPQHVHIYSASWGPDDDGKTVDGPAPLTRQAFENGVRMGRRGLGSVFVWASGNGGRSKDHCSCDGYTNSIYTISISSTAESGKKPWYLEECSSTLATTYSSGESYDKKIITTDLRQRCTDNHTGTSASAPMAAGIIALALEANPFLTWRDVQHVIVRTSRAGHLNANDWKTNAAGFKVSHLYGFGLMDAEAMVMEAEKWTTVPRQHVCVESTDRQIKTIRPNSAVRSIYKASGCSDNPNRHVNYLEHVVVRITITHPRRGDLAIYLTSPSGTRSQLLANRLFDHSMEGFKNWEFMTIHCWGERAAGDWVLEVYDTPSQLRNFKTPGKLKEWSLVLYGTSVQPYSPTNEFPKVERFRYSRVEDPTDDYGTEDYAGPCDPECSEVGCDGPGPDHCNDCLHYYYKLKNNTRICVSSCPPGHYHADKKRCRKCAPNCESCFGSHGDQCMSCKYGYFLNEETNSCVTHCPDGSYQDTKKNLCRKCSENCKTCTEFHNCTECRDGLSLQGSRCSVSCEDGRYFNGQDCQPCHRFCATCAGAGADGCINCTEGYFMEDGRCVQSCSISYYFDHSSENGYKSCKKCDISCLTCNGPGFKNCTSCPSGYLLDLGMCQMGAICKDGEYVDEHGHCQTCEASCAKCQGPTQEDCTTCPMTRIFDDGRCVSNCPSWKFEFENQCHPCHHTCQRCQGSGPTHCTSCGADNYGREHFLYQGECGDSCPEGHYATEGNTCLPCPDNCELCHSVHVCTRCMKGYFIAPTNHTCQKLECGQGEVQDPDYEECVPCEEGCLGCSLDDPGTCTSCAMGYYRFDHHCYKTCPEKTYSEEVECKACDSNCGSCDQNGCYWCEEGFFLLGGSCVRKCGPGFYGDQEMGECESCHRACETCTGPGHDECSSCQEGLQLLRGMCVHATKTQEEGKFWNDILRKLQPCHSSCKTCNGSATLCTSCPKGAYLLAQACVSSCPQGTWPSVRSGSCENCTEACAICSGADLCKKCQMQPGHPLFLHEGRCYSKCPEGSYAEDGICERCSSPCRTCEGNATNCHSCEGGHVLHHGVCQENCPERHVAVKGVCKHCPEMCQDCIHEKTCKECTPEFFLHDDMCHQSCPRGFYADSRHCVPCHKDCLECSGPKADDCELCLESSWVLYDGLCLEECPAGTYYEKETKECRDCHKSCLTCSSSGTCTTCQKGLIMNPRGSCMANEKCSPSEYWDEDAPGCKPCHVKCFHCMGPAEDQCQTCPMNSLLLNTTCVKDCPEGYYADEDSNRCAHCHSSCRTCEGRHSRQCHSCRPGWFQLGKECLLQCREGYYADNSTGRCERCNRSCKGCQGPRPTDCLSCDRFFFLLRSKGECHRSCPDHYYVEQSTQTCERCHPTCDQCKGKGALNCLSCVWSYHLMGGICTSDCLVGEYRVGEGEKFNCEKCHESCMECKGPGAKNCTLCPANLVLHMDDSHCLHCCNTSDPPSAQECCDCQDTTDECILRTSKVRPATEHFKT

SEQ ID NO: 2871 - protein, 170 aa, synthetic construct
  REGION 1..170: note = PDCD1 (Q15116) SP+PP+ECD
MQIPQAPWPVVWAVLQLGWRPGWFLDSPDRPWNPPTFSPALLVVTEGDNATFTCSFSNTSESFVLNWYRMSPSNQTDKLAAFPEDRSQPGQDCRFRVTQLPNGRDFHMSVVRARRNDSGTYLCGAISLAPKAQIKESLRAELRVTERRAEVPTAHPSPSPRPAGQFQTLV

SEQ ID NO: 2872 - protein, 220 aa, synthetic construct
  REGION 1..220: note = PDCD1LG2 (Q9BQ51) SP+PP+ECD
MIFLLLMLSLELQLHQIAALFTVTVPKELYIIEHGSNVTLECNFDTGSHVNLGAITASLQKVENDTSPHRERATLLEEQLPLGKASFHIPQVQVRDEGQYQCIIIYGVAWDYKYLTLKVKASYRKINTHILKVPETDEVELTCQATGYPLAEVSWPNVSVPANTSHSRTPEGLYQVTSVLRLKPPPGRNFSCVFWNTHVRELTLASIDLQSQMEPRTHPT

SEQ ID NO: 2873 - protein, 528 aa, synthetic construct
  REGION 1..528: note = PDGFRA (P16234) SP+PP+ECD
MGTSHPAFLVLGCLLTGLSLILCQLSLPSILPNENEKVVQLNSSFSLRCFGESEVSWQYPMSEEESSDVEIRNEENNSGLFVTVLEVSSASAAHTGLYTCYYNHTQTEENELEGRHIYIYVPDPDVAFVPLGMTDYLVIVEDDDSAIIPCRTTDPETPVTLHNSEGVVPASYDSRQGFNGTFTVGPYICEATVKGKKFQTIPFNVYALKATSELDLEMEALKTVYKSGETIVVTCAVFNNEVVDLQWTYPGEVKGKGITMLEEIKVPSIKLVYTLTVPEATVKDSGDYECAARQATREVKEMKKVTISVHEKGFIEIKPTFSQLEAVNLHEVKHFVVEVRAYPPPRISWLKNNLTLIENLTEITTDVEKIQEIRYRSKLKLIRAKEEDSGHYTIVAQNEDAVKSYTFELLTQVPSSILDLVDDHHGSTGGQTVRCTAEGTPLPDIEWMICKDIKKCNNETSWTILANNVSNIITEIHSRDRSTVEGRVTFAKVEETIAVRCLAKNLLGAENRELKLVAPTLRSELTVA

SEQ ID NO: 2874 - protein, 532 aa, synthetic construct
  REGION 1..532: note = PDGFRB (P09619) SP+PP+ECD
MRLPGAMPALALKGELLLLSLLLLLEPQISQGLVVTPPGPELVLNVSSTFVLTCSGSAPVVWERMSQEPPQEMAKAQDGTFSSVLTLTNLTGLDTGEYFCTHNDSRGLETDERKRLYIFVPDPTVGFLPNDAEELFIFLTEITEITIPCRVTDPQLVVTLHEKKGDVALPVPYDHQRGFSGIFEDRSYICKTTIGDREVDSDAYYVYRLQVSSINVSVNAVQTVVRQGENITLMCIVIGNEVVNFEWTYPRKESGRLVEPVTDFLLDMPYHIRSILHIPSAELEDSGTYTCNVTESVNDHQDEKAINITVVESGYVRLLGEVGTLQFAELHRSRTLQVVFEAYPPPTVLWFKDNRTLGDSSAGEIALSTRNVSETRYVSELTLVRVKVAEAGHYTMRAFHEDAEVQLSFQLQINVPVRVLELSESHPDSGEQTVRCRGRGMPQPNIIWSACRDLKRCPRELPPTLLGNSSEEESQLETNVTYWEEEQEFEVVSTLRLQHVDRPLSVRCTLRNAVGQDTQEVIVVPHSLPFKV

SEQ ID NO: 2875 - protein, 755 aa, synthetic construct
  REGION 1..755: note = PEAR1 (Q5VY43) SP+PP+ECD
MSPPLCPLLLLAVGLRLAGTLNPSDPNTCSFWESFTTTTKESHSRPFSLLPSEPCERPWEGPHTCPQPTVVYRTVYRQVVKTDHRQRLQCCHGFYESRGFCVPLCAQECVHGRCVAPNQCQCVPGWRGDDCSSECAPGMWGPQCDKPCSCGNNSSCDPKSGVCSCPSGLQPPNCLQPCTPGYYGPACQFRCQCHGAPCDPQTGACFCPAERTGPSCDVSCSQGTSGFFCPSTHSCQNGGVFQTPQGSCSCPPGWMGTICSLPCPEGFHGPNCSQECRCHNGGLCDRFTGQCRCAPGYTGDRCREECPVGRFGQDCAETCDCAPDARCFPANGACLCEHGFTGDRCTDRLCPDGFYGLSCQAPCTCDREHSLSCHPMNGECSCLPGWAGLHCNESCPQDTHGPGCQEHCLCLHGGVCQATSGLCQCAPGYTGPHCASLCPPDTYGVNCSARCSCENAIACSPIDGECVCKEGWQRGNCSVPCPPGTWGFSCNASCQCAHEAVCSPQTGACTCTPGWHGAHCQLPCPKGQFGEGCASRCDCDHSDGCDPVHGRCQCQAGWMGARCHLSCPEGLWGVNCSNTCTCKNGGTCLPENGNCVCAPGFRGPSCQRSCQPGRYGKRCVPCKCANHSFCHPSNGTCYCLAGWTGPDCSQPCPPGHWGENCAQTCQCHHGGTCHPQDGSCICPLGWTGHHCLEGCPLGTFGANCSQPCQCGPGEKCHPETGACVCPPGHSGAPCRIGIQEPFTVMPTTPVAYNSL

SEQ ID NO: 2876 - protein, 601 aa, synthetic construct
  REGION 1..601: note = PECAM1 (P16284) SP+PP+ECD
MQPRWAQGATMWLGVLLTLLLCSSLEGQENSFTINSVDMKSLPDWTVQNGKNLTLQCFADVSTTSHVKPQHQMLFYKDDVLFYNISSMKSTESYFIPEVRIYDSGTYKCTVIVNNKEKTTAEYQVLVEGVPSPRVTLDKKEAIQGGIVRVNCSVPEEKAPIHFTIEKLELNEKMVKLKREKNSRDQNFVILEFPVEEQDRVLSFRCQARIISGIHMQTSESTKSELVTVTESFSTPKFHISPTGMIMEGAQLHIKCTIQVTHLAQEFPEIIIQKDKAIVAHNRHGNKAVYSVMAMVEHSGNYTCKVESSRISKVSSIVVNITELFSKPELESSFTHLDQGERLNLSCSIPGAPPANFTIQKEDTIVSQTQDFTKIASKSDSGTYICTAGIDKVVKKSNTVQIVVCEMLSQPRISYDAQFEVIKGQTIEVRCESISGTLPISYQLLKTSKVLENSTKNSNDPAVFKDNPTEDVEYQCVADNCHSHAKMLSEVLRVKVIAPVDEVQISILSSKVVESGEDIVLQCAVNEGSGPITYKFYREKEGKPFYQMTSNATQAFWTKQKASKEQEGEYYCTAFNRANHASSVPRSKILTVRVILAPWKK

SEQ ID NO: 2877 - protein, 427 aa, synthetic construct
  REGION 1..427: note = PI16 (Q6UXB8) SP+PP+ECD
MHGSCSFLMLLLPLLLLLVATTGPVGALTDEEKRLMVELHNLYRAQVSPTASDMLHMRWDEELAAFAKAYARQCVWGHNKERGRRGENLFAITDEGMDVPLAMEEWHHEREHYNLSAATCSPGQMCGHYTQVVWAKTERIGCGSHFCEKLQGVEETNIELLVCNYEPPGNVKGKRPYQEGTPCSQCPSGYHCKNSLCEPIGSPEDAQDLPYLVTEAPSFRATEASDSRKMGTPSSLATGIPAFLVTEVSGSLATKALPAVETQAPTSLATKDPPSMATEAPPCVTTEVPSILAAHSLPSLDEEPVTFPKSTHVPIPKSADKVTDKTKVPSRSPENSLDPKMSLTGARELLPHAQEEAEAEAELPPSSEVLASVFPAQDKPGELQATLDHTGHTSSKSLPNFPNTSATANATGGRALALQSSLPGAEG

SEQ ID NO: 2878 - protein, 638 aa, synthetic construct
  REGION 1..638: note = PIGR (P01833) SP+PP+ECD
MLLFVLTCLLAVFPAISTKSPIFGPEEVNSVEGNSVSITCYYPPTSVNRHTRKYWCRQGARGGCITLISSEGYVSSKYAGRANLTNFPENGTFVVNIAQLSQDDSGRYKCGLGINSRGLSFDVSLEVSQGPGLLNDTKVYTVDLGRTVTINCPFKTENAQKRKSLYKQIGLYPVLVIDSSGYVNPNYTGRIRLDIQGTGQLLFSVVINQLRLSDAGQYLCQAGDDSNSNKKNADLQVLKPEPELVYEDLRGSVTFHCALGPEVANVAKFLCRQSSGENCDVVVNTLGKRAPAFEGRILLNPQDKDGSFSVVITGLRKEDAGRYLCGAHSDGQLQEGSPIQAWQLFVNEESTIPRSPTVVKGVAGGSVAVLCPYNRKESKSIKYWCLWEGAQNGRCPLLVDSEGWVKAQYEGRLSLLEEPGNGTFTVILNQLTSRDAGFYWCLTNGDTLWRTTVEIKIIEGEPNLKVPGNVTAVLGETLKVPCHFPCKFSSYEKYWCKWNNTGCQALPSQDEGPSKAFVNCDENSRLVSLTLNLVTRADEGWYWCGVKQGHFYGETAAVYVAVEERKAAGSRDVSLAKADAAPDEKVLDSGFREIENKAIQDPRLFAEEKAVADTRDQADGSRASVDSGSSEEQGGSSR

SEQ ID NO: 2879 - protein, 527 aa, synthetic construct
  REGION 1..527: note = PIGT (Q969N2) SP+PP+ECD
MAAAMPLALLVLLLLGPGGWCLAEPPRDSLREELVITPLPSGDVAATFQFRTRWDSELQREGVSHYRLFPKALGQLISKYSLRELHLSFTQGFWRTRYWGPPFLQAPSGAELWVWFQDTVTDVDKSWKELSNVLSGIFCASLNFIDSTNTVTPTASFKPLGLANDTDHYFLRYAVLPREVVCTENLTPWKKLLPCSSKAGLSVLLKADRLFHTSYHSQAVHIRPVCRNARCTSISWELRQTLSVVFDAFITGQGKKDWSLFRMFSRTLTEPCPLASESRVYVDITTYNQDNETLEVHPPPTTTYQDVILGTRKTYAIYDLLDTAMINNSRNLNIQLKWKRPPENEAPPVPFLHAQRYVSGYGLQKGELSTLLYNTHPYRAFPVLLLDTVPWYLRLYVHTLTITSKGKENKPSYIHYQPAQDRLQPHLLEMLIQLPANSVTKVSIQFERALLKWTEYTPDPNHGFYVSPSVLSALVPSMVAAKPVDWEESPLFNSLFPVSDGSNYFVRLYTEPLLVNLPTPDFSMPYN

SEQ ID NO: 2880 - protein, 168 aa, synthetic construct
  REGION 1..168: note = PIK3IP1 (Q96FE7) SP+PP+ECD
MLLAWVQAFLVSNMLLAEAYGSGGCFWDNGHLYREDQTSPAPGLRCLNWLDAQSGLASAPVSGAGNHSYCRNPDEDPRGPWCYVSGEAGVPEKRPCEDLRCPETTSQALPAFTTEIQEASEGPGADEVQVFAPANALPARSEAAAVQPVIGISQRVRMNSKEKKDLGT

SEQ ID NO: 2881 - protein, 197 aa, synthetic construct
  REGION 1..197: note = PILRA (Q9UKJ1) SP+PP+ECD
MGRPLLLPLLPLLLPPAFLQPSGSTGSGPSYLYGVTQPKHLSASMGGSVEIPFSFYYPWELATAPDVRISWRRGHFHRQSFYSTRPPSIHKDYVNRLFLNWTEGQKSGFLRISNLQKQDQSVYFCRVELDTRSSGRQQWQSIEGTKLSITQAVTTTTQRPSSMTTTWRLSSTTTTTGLRVTQGKRRSDSWHISLETA

SEQ ID NO: 2882 - protein, 191 aa, synthetic construct
  REGION 1..191: note = PILRB (Q9UKJ0) SP+PP+ECD
MGRPLLLPLLLLLQPPAFLQPGGSTGSGPSYLYGVTQPKHLSASMGGSVEIPFSFYYPWELAIVPNVRISWRRGHFHGQSFYSTRPPSIHKDYVNRLFLNWTEGQESGFLRISNLRKEDQSVYFCRVELDTRRSGRQQLQSIKGTKLTITQAVTTTTTWRPSSTTTIAGLRVTESKGHSESWHLSLDTAIR

SEQ ID NO: 2883 - protein, 3858 aa, synthetic construct
  REGION 1..3858: note = PKHD1 (P08F94) SP+PP+ECD
MTAWLISLMSIEVLLLAVRHLSLHIEPEEGSLAGGTWITVIFDGLELGVLYPNNGSQLEIHLVNVNMVVPALRSVPCDVFPVFLDLPVVTCRTRSVLSEAHEGLYFLEAYFGGQLVSSPNPGPRDSCTFKFSKAQTPIVHQVYPPSGVPGKLIHVYGWIITGRLETFDFDAEYIDSPVILEAQGDKWVTPCSLINRQMGSCYPIQEDHGLGTLQCHVEGDYIGSQNVSFSVFNKGKSMVHKKAWLISAKQDLFLYQTHSEILSVFPETGSLGGRTNITITGDFFDNSAQVTIAGIPCDIRHVSPRKIECTTRAPGKDVRLTTPQPGNRGLLFEVGDAVEGLELTEATPGYRWQIVPNASSPFGFWSQEGQPFRARLSGFFVAPETNNYTFWIQADSQASLHFSWSEEPRTKVKVASISVGTADWFDSWEQNRDEGTWQQKTPKLELLGGAMYYLEAEHHGIAPSRGMRIGVQIHNTWLNPDVVTTYLREKHQIRVRAQRLPEVQVLNVSGRGNFFLTWDNVSSQPIPANATAHLIQTTIEELLAVKCKLEPLWSNILLRLGFERGPEVSNSDGDLTSGTEPFCGRFSLRQPRHLVLTPPAAQKGYRLDQYTHLCLAYKGHMNKILKMIVSFTIGFQNMVKNTTCDWSLTRTSPESWQFDCTDLWETCVRCFGDLQPPPANSPVLVHQINLLPLAQETGLFYVDEIIIADTNVTVSQADSGTARPGGNLVESVSVVGSPPVYSVTSWLAGCGTELPLITARSVPTEGTEEGSGLVLVTTQRRQRTSPPLGGHFRIQLPNTVISDVPVQISAHHLHQLLQNNADDFTSRYLNASDFTVKEDLYTCYEHVWTLSWSTQIGDLPNFIRVSDENLTGVNPAAATRVVYDGGVFLGPIFGDMLATANQHTQVVVRVNDVPAHCPGSCSFQYLQGSTPCVHSVWYSIDGDINLMIYITGTGFSGDSQFLQVTVNKTSCKVIFSNQTNVVCQTDLLPVGMHRILMLVRPSGLAISATGEDLFLNVKPRLDMVEPSRAADIGGLWATIRGSSLEGVSLILFGSYSCAINVATSNSSRIQCKVPPRGKDGRIVNVTVIRGDYSAVLPRAFTYVSSLNPVIVTLSRNISNIAGGETLVIGVARLMNYTDLDVEVHVQDALAPVHTQSAWGLEVALPPLPAGLHRISVSINGVSIHSQGVDLHIQYLTEVFSIEPCCGSLLGGTILSISGIGFSRDPALVWVLVGNRSCDIVNLTEASIWCETLPAPQIPDAGAPTVPAAVEVWAGNRFFARGPSPSLVGKGFTFMYEAAATPVVTAMQGEITNSSLSLHVGGSNLSNSVILLGNLNCDVETQSFQGNVSLSGCSIPLHSLEAGIYPLQVRQKQMGFANMSVVLQQFAVMPRIMAIFPSQGSACGGTILTVRGLLLNSRRRSVRVDLSGPFTCVILSLGDHTILCQVSLEGDPLPGASFSLNVTVLVNGLTSECQGNCTLFIREEASPVMDALSTNTSGSLTTVLIRGQRLATTADEPMVFVDDQLPCNVTFFNASHVVCQTRDLAPGPHYLSVFYTRNGYACSGNVSRHFYIMPQVFHYFPKNFSLHGGSLLTIEGTGLRGQNTTSVYIDQQTCLTVNIGAELIRCIVPTGNGSVALEIEVDGLWYHIGVIGYNKAFTPELISISQSDDILTFAVAQISGAANIDIFIGMSPCVGVSGNHTVLQCVVPSLPAGEYHVRGYDCIRGWASSALVFTSRVIITAVTENFGCLGGRLVHVFGAGFSPGNVSAAVCGAPCRVLANATVSAFSCLVLPLDVSLAFLCGLKREEDSCEAARHTYVQCDLTVAMATEQLLESWPYLYICEESSQCLFVPDHWAESMFPSFSGLFISPKLERDEVLIYNSSCNITMETEAEMECETPNQPITVKITEIRKRWGQNTQGNFSLQFCRRWSRTHSWFPERLPQDGDNVTVENGQLLLLDTNTSILNLLHIKGGKLIFMAPGPIELRAHAILVSDGGELRIGSEDKPFQGRAQITLYGSSYSTPFFPYGVKFLAVRNGTLSLHGSLPEVIVTCLRATAHALDTVLALEDAVDWNPGDEVVIISGTGVKGAKPMEEIVTVETVQDTDLYLKSPLRYSHNFTENWVAGEHHILKATVALLSRSITIQGNLTNEREKLLVSCQEANAPEGNLQHCLYSMSEKMLGSRDMGARVIVQSFPEEPSQVQLKGVQFQVLGQAFHKHLSSLTLVGAMRESFIQGCTVRNSFSRGLSMCGTLGLKVDSNVFYNILGHALLVGTCTEMRYISWEAIHGRKDDWSGHGNIIRNNVIIQVSGAEGLSNPEMLTPSGIYICSPTNVIEGNRVCGAGYGYFFHLMTNQTSQAPLLSFTQNIAHSCTRYGLFVYPKFQPPWDNVTGTTLFQSFTVWESAGGAQIFRSSNLRLKNFKVYSCRDFGIDVLESDANTSVTDSLLLGHFAHKGSLCMSSGIKTPKRWELMVSNTTFVNFDLINCVAIRTCSDCSQGQGGFTVKTSQLKFTNSSNLVAFPFPHAAILEDLDGSLSGKNRSHILASMETLSASCLVNSSFGRVVHGSACGGGVLFHRMSIGLANTPEVSYDLTMTDSRNKTTTVNYVRDTLSNPRGWMALLLDQETYSLQSENLWINRSLQYSATFDNFAPGNYLLLVHTDLPPYPDILLRCGSRVGLSFPFLPSPGQNQGCDWFFNSQLRQLTYLVSGEGQVQVILRVKEGMPPTISASTSAPESALKWSLPETWQGVEEGWGGYNNTIPGPGDDVLILPNRTVLVDTDLPFFKGLYVMGTLDFPVDRSNVLSVACMVIAGGELKVGTLENPLEKEQKLLILLRASEGVFCDRMNGIHIDPGTIGVYGKVHLYSAYPKNSWTHLGADIASGNERIIVEDAVDWRPHDKIVLSSSSYEPHEAEVLTVKEVKGHHVRIYERLKHRHIGSVHVTEDGRHIRLAAEVGLLTRNIQIQPDVSCRGRLFVGSFRKSSREEFSGVLQLLNVEIQNFGSPLYSSVEFSNVSAGSWIISSTLHQSCGGGIHAAASHGVLLNDNIVFGTAGHGIDLEGQAYTVTNNLVVLMTQPAWSTIWVAGIKVNQVKDINLHGNVVAGSERLGFHIRGHKCSSCELLWSDNVAHSSLHGLHLYKESGLDNCTRISGFLAFKNFDYGAMLHVENSVEIENITLVDNTIGLLAVVYVFSAPQNSVKKVQIVLRNSVIVATSSSFDCIQDKVKPHSANLTSTDRAPSNPRGGRIGILWPVFTSEPNQWPQEPWHKVRNDHSISGIMKLQDVTFSSFVKSCYSDDLDVCILPNAENSGIMHPITAERTRMLKIKDKNKFYFPSLQPRKDLGKVVCPELDCASPRKYLFKDLDGRALGLPPPVSVFPKTEAEWTASFFNAGTFREEQKCTYQFLMQGFICKQTDQVVLILDSADAIWAIQKLYPVVSVTSGFVDVFSSVNANIPCSTSGSVSTFYSILPIRQITKVCFMDQTPQVLRFFLLGNKSTSKLLLAVFYHELQSPHVFLGESFIPPTLVQSASLLLNESIGANYFNIMDNLLYVVLQGEEPIEIRSGVSIHLALTVMVSVLEKGWEIVILERLTNFLQIGQNQIRFIHEMPGHEETLKAIADSRAKRKRNCPTVTCTSHYRRVGQRRPLMMEMNSHRASPPMTVETISKVIVIEIGDSPTVRSTGMISSLSSNKLQNLAHRVITAQQTGVLENVLNMTIGALLVTQSKGVIGYGNTSSFKTGNLIYIRPYALSILVQPSDGEVGNELPVQPQLVFLDEQNRRVESLGPPSEPWTISASLEGASDSVLKGCTQAETQDGYVSFYNLAVLISGSNWHFIFTVTSPPGVNFTARSKPFAVLPVTRKEKST

SEQ ID NO: 2884 - protein, 4210 aa, synthetic construct
  REGION 1..4210: note = PKHD1L1 (Q86WI1) SP+PP+ECD
MGHLWLLGIWGLCGLLLCAADPSTDGSQIIPKVTEIIPKYGSINGATRLTIRGEGFSQANQFNYGVDNAELGNSVQLISSFQSITCDVEKDASHSTQITCYTRAMPEDSYTVRVSVDGVPVTENNTCKGHINSWECTFNAKSFRTPTIRSITPLSGTPGTLITIQGRIFTDVYGSNIALSSNGKNVRILRVYIGGMPCELLIPQSDNLYGLKLDHPNGDMGSMVCKTTGTFIGHHNVSFILDNDYGRSFPQKMAYFVSSLNKIAMFQTYAEVTMIFPSQGSIRGGTTLTISGRFFDQTDFPVRVLVGGEPCDILNVTENSICCKTPPKPHILKTVYPGGRGLKLEVWNNSRPIRLEEILEYNEKTPGYMGASWVDSASYIWLMEQDTFVARFSGFLVAPDSDVYRFYIKGDDRYAIYFSQTGLPEDKVRIAYHSANANSYFSSPTQRSDDIHLQKGKEYYIEILLQEYRLSAFVDVGLYQYRNVYTEQQTGDAVNEEQVIKSQSTILQEVQVITLENWETTNAINEVQKIKVTSPCVEANSCSLYQYRLIYNMEKTVFLPADASEFILQSALNDLWSIKPDTVQVIRTQNPQSYVYMVTFISTRGDFDLLGYEVVEGNNVTLDITEQTKGKPNLETFTLNWDGIASKPLTLWSSEAEFQGAVEEMVSTKCPPQIANFEEGFVVKYFRDYETDFNLEHINRGQKTAETDAYCGRYSLKNPAVLFDSADVKPNRRPYGDILLFPYNQLCLAYKGFLANYIGLKFQYQDNSKITRSTDTQFTYNFAYGNNWTYTCIDLLDLVRTKYTGTNVSLQRISLHKASESQSFYVDVVYIGHTSTISTLDEMPKRRLPALANKGIFLEHFQVNQTKTNGPTMTNQYSVTMTSYNCSYNIPMMAVSFGQIITHETENEFVYRGNNWPGESKIHIQRIQAASPPLSGSFDIQAYGHILKGLPAAVSAADLQFALQSLEGMGRISVTREGTCAGYAWNIKWRSTCGKQNLLQINDSNIIGEKANMTVTRIKEGGLFRQHVLGDLLRTPSQQPQVEVYVNGIPAKCSGDCGFTWDSNITPLVLAISPSQGSYEEGTILTIVGSGFSPSSAVTVSVGPVGCSLLSVDEKELKCQILNGSAGHAPVAVSMADVGLAQNVGGEEFYFVYQSQISHIWPDSGSIAGGTLLTLSGFGFNENSKVLVGNETCNVIEGDLNRITCRTPKKTEGTVDISVTTNGFQATARDAFSYNCLQTPIITDFSPKVRTILGEVNLTIKGYNFGNELTQNMAVYVGGKTCQILHWNFTDIRCLLPKLSPGKHDIYVEVRNWGFASTRDKLNSSIQYVLEVTSMFPQRGSLFGGTEITIRGFGFSTIPAENTVLLGSIPCNVTSSSENVIKCILHSTGNIFRITNNGKDSVHGLGYAWSPPVLNVSVGDTVAWHWQTHPFLRGIGYRIFSVSSPGSVIYDGKGFTSGRQKSTSGSFSYQFTSPGIHYYSSGYVDEAHSIFLQGVINVLPAETRHIPLHLFVGRSEATYAYGGPENLHLGSSVAGCLATEPLCSLNNTRVKNSKRLLFEVSSCFSPSISNITPSTGTVNELITIIGHGFSNLPWANKVTIGSYPCVVEESSEDSITCHIDPQNSMDVGIRETVTLTVYNLGTAINTLSNEFDRRFVLLPNIDLVLPNAGSTTGMTSVTIKGSGFAVSSAGVKVLMGHFPCKVLSVNYTAIECETSPAAQQLVDVDLLIHGVPAQCQGNCTFSYLESITPYITGVFPNSVIGSVKVLIEGEGLGTVLEDIAVFIGNQQFRAIEVNENNITALVTPLPVGHHSVSVVVGSKGLALGNLTVSSPPVASLSPTSGSIGGGTTLVITGNGFYPGNTTVTIGDEPCQIISINPNEVYCRTPAGTTGMVDVKIFVNTIAYPPLLFTYALEDTPFLRGIIPSRGPPGTEIEITGSNFGFEILEISVMINNIQCNVTMANDSVVQCIVGDHAGGTFPVMMHHKTKGSAMSTVVFEYPLNIQNINPSQGSFGGGQTMTVTGTGFNPQNSIILVCGSECAIDRLRSDYTTLLCEIPSNNGTGAEQACEVSVVNGKDLSQSMTPFTYAVSLTPLITAVSPKRGSTAGGTRLTVVGSGFSENMEDVHITIAEAKCDVEYSNKTHIICMTDAHTLSGWAPVCVHIRGVGMAKLDNADFLYVDAWSSNFSWGGKSPPEEGSLVVITKGQTILLDQSTPILKMLLIQGGTLIFDEADIELQAENILITDGGVLQIGTETSPFQHKAVITLHGHLRSPELPVYGAKTLAVREGILDLHGVPVPVTWTRLAHTAKAGERILILQEAVTWKPGDNIVIASTGHRHSQGENEKMTIASVSADGINITLSNPLNYTHLGITVTLPDGTLFEARAEVGILTRNILIRGSDNVEWNNKIPACPDGFDTGEFATQTCLQGKFGEEIGSDQFGGCVMFHAPVPGANMVTGRIEYVEVFHAGQAFRLGRYPIHWHLLGDLQFKSYVRGCAIHQAYNRAVTIHNTHHLLVERNIIYDIKGGAFFIEDGIEHGNILQYNLAVFVQQSTSLLNDDVTPAAFWVTNPNNTIRHNAVAGGTHFGFWYRMNNHPDGPSYDRNICQKRVPLGEFFNNTVHSQGWFGMWIFEEYFPMQTGSCTSTVPAPAIFNSLTTWNCQKGAEWVNGGALQFHNFVMVNNYEAGIETKRILAPYVGGWGETNGAVIKNAKIVGHLDELGMGSAFCTAKGLVLPFSEGLTVSSVHFMNFDRPNCVALGVTSISGVCNDRCGGWSAKFVDVQYSHTPNKAGFRWEHEMVMIDVDGSLTGHKGHTVIPHSSLLDPSHCTQEAEWSIGFPGSVCDASVSFHRLAFNQPSPVSLLEKDVVLSDSFGTSIIPFQKKRLTHMSGWMALIPNANHINWYFKGVDHITNISYTSTFYGFKEEDYVIISHNFTQNPDMFNIIDMRNGSSNPLNWNTSKNGDWHLEANTSTLYYLVSGRNDLHQSQLISGNLDPDVKDVVINFQAYCCILQDCFPVHPPSRKPIPKKRPATYNLWSNDSFWQSSRENNYTVPHPGANVIIPEGTWIVADIDMPSMERLIIWGVLELEDKYNVGAAESSYREVVLNATYISLQGGRLIGGWEDNPFKGDLKIVLRGNHTTQDWALPEGPNQGAKVLGVFGELDLHGIPHSIYKTKLSETAFAGSKVLSLMDAVDWQEGEEIVITTTSYDFHQTETRSIVKILHDHKILILNDSLSYTHFAEKYHVPGTGESYTLAADVGILSRNIKIVGEDYPGWSEDSFGARVLVGSFTENMMTFKGNARISNVEFYHSGQEGFRDSTDPRYAVTFLNLGQIQEHGSSYIRGCAFHHGFSPAIGVFGTDGLDIDDNIIHFTVGEGIRIWGNANRVRGNLIALSVWPGTYQNRKDLSSTLWHAAIEINRGTNTVLQNNVVAGFGRAGYRIDGEPCPGQFNPVEKWFDNEAHGGLYGIYMNQDGLPGCSLIQGFTIWTCWDYGIYFQTTESVHIYNVTLVDNGMAIFPMIYMPAAISHKISSKNVQIKSSLIVGSSPGFNCSDVLTNDDPNIELTAAHRSPRSPSGGRSGICWPTFASAHNMAPRKPHAGIMSYNAISGLLDISGSTFVGFKNVCSGETNVIFITNPLNEDLQHPIHVKNIKLVDTTEQSKIFIHRPDISKVNPSDCVDMVCDAKRKSFLRDIDGSFLGNAGSVIPQAEYEWDGNSQVGIGDYRIPKAMLTFLNGSRIPVTEKAPHKGIIRDSTCKYLPEWQSYQCFGMEYAMMVIESLDPDTETRRLSPVAIMGNGYVDLINGPQDHGWCAGYTCQRRLSLFHSIVALNKSYEVYFTGTSPQNLRLMLLNVDHNKAVLVGIFFSTLQRLDVYVNNLLVCPKTTIWNAQQKHCELNNHLYKDQFLPNLDSTVLGENYFDGTYQMLYLLVKGTIPVEIHTATVIFVSFQLSVATEDDFYTSHNLVKNLALFLKIPSDKIRISKIRGKSLRRKRSMGFIIEIEIGDPPIQFISNGTTGQMQLSELQEIAGSLGQAVILGNISSILGFNISSMSITNPLPSPSDSGWIKVTAQPVERSAFPVHHVAFVSSLLVITQPVAAQPGQPFPQQPSVKATDSDGNCVSVGITALTLRAILKDSNNNQVNGLSGNTTIPFSSCWANYTDLTPLRTGKNYKIEFILDNVVGVESRTFSLLAESVSSSGSSSSSNSKASTVGTYAQ

SEQ ID NO: 2885 - protein, 1397 aa, synthetic construct
  REGION 1..1397: note = PLA2R1 (Q13018) SP+PP+ECD
MLLSPSLLLLLLLGAPRGCAEGVAAALTPERLLEWQDKGIFVIQSESLKKCIQAGKSVLTLENCKQANKHMLWKWVSNHGLFNIGGSGCLGLNFSAPEQPLSLYECDSTLVSLRWRCNRKMITGPLQYSVQVAHDNTVVASRKYIHKWISYGSGGGDICEYLHKDLHTIKGNTHGMPCMFPFQYNHQWHHECTREGREDDLLWCATTSRYERDEKWGFCPDPTSAEVGCDTIWEKDLNSHICYQFNLLSSLSWSEAHSSCQMQGGTLLSITDETEENFIREHMSSKTVEVWMGLNQLDEHAGWQWSDGTPLNYLNWSPEVNFEPFVEDHCGTFSSFMPSAWRSRDCESTLPYICKKYLNHIDHEIVEKDAWKYYATHCEPGWNPYNRNCYKLQKEEKTWHEALRSCQADNSALIDITSLAEVEFLVTLLGDENASETWIGLSSNKIPVSFEWSNDSSVIFTNWHTLEPHIFPNRSQLCVSAEQSEGHWKVKNCEERLFYICKKAGHVLSDAESGCQEGWERHGGFCYKIDTVLRSFDQASSGYYCPPALVTITNRFEQAFITSLISSVVKMKDSYFWIALQDQNDTGEYTWKPVGQKPEPVQYTHWNTHQPRYSGGCVAMRGRHPLGRWEVKHCRHFKAMSLCKQPVENQEKAEYEERWPFHPCYLDWESEPGLASCFKVFHSEKVLMKRTWREAEAFCEEFGAHLASFAHIEEENFVNELLHSKFNWTEERQFWIGFNKRNPLNAGSWEWSDRTPVVSSFLDNTYFGEDARNCAVYKANKTLLPLHCGSKREWICKIPRDVKPKIPFWYQYDVPWLFYQDAEYLFHTFASEWLNFEFVCSWLHSDLLTIHSAHEQEFIHSKIKALSKYGASWWIGLQEERANDEFRWRDGTPVIYQNWDTGRERTVNNQSQRCGFISSITGLWGSEECSVSMPSICKRKKVWLIEKKKDTPKQHGTCPKGWLYFNYKCLLLNIPKDPSSWKNWTHAQHFCAEEGGTLVAIESEVEQAFITMNLFGQTTSVWIGLQNDDYETWLNGKPVVYSNWSPFDIINIPSHNTTEVQKHIPLCALLSSNPNFHFTGKWYFEDCGKEGYGFVCEKMQDTSGHGVNTSDMYPMPNTLEYGNRTYKIINANMTWYAAIKTCLMHKAQLVSITDQYHQSFLTVVLNRLGYAHWIGLFTTDNGLNFDWSDGTKSSFTFWKDEESSLLGDCVFADSNGRWHSTACESFLQGAICHVPPETRQSEHPELCSETSIPWIKFKSNCYSFSTVLDSMSFEAAHEFCKKEGSNLLTIKDEAENAFLLEELFAFGSSVQMVWLNAQFDGNNETIKWFDGTPTDQSNWGIRKPDTDYFKPHHCVALRIPEGLWQLSPCQEKKGFICKMEADIHTAEALPEKGPSHS

SEQ ID NO: 2886 - protein, 1417 aa, synthetic construct
  REGION 1..1417: note = PLB1 (Q6P1J6) SP+PP+ECD
MGLRPGIFLLELLLLLGQGTPQIHTSPRKSTLEGQLWPETLKNSPFPCNPNKLGVNMPSKSVHSLKPSDIKFVAAIGNLEIPPDPGTGDLEKQDWTERPQQVCMGVMTVLSDIIRYFSPSVPMPVCHTGKRVIPHDGAEDLWIQAQELVRNMKENLQLDFQFDWKLINVFFSNASQCYLCPSAQQNGLAAGGVDELMGVLDYLQQEVPRAFVNLVDLSEVAEVSRQYHGTWLSPAPEPCNCSEETTRLAKVVMQWSYQEAWNSLLASSRYSEQESFTVVFQPFFYETTPSLHSEDPRLQDSTTLAWHLWNRMMEPAGEKDEPLSVKHGRPMKCPSQESPYLFSYRNSNYLTRLQKPQDKLEVREGAEIRCPDKDPSDTVPTSVHRLKPADINVIGALGDSLTAGNGAGSTPGNVLDVLTQYRGLSWSVGGDENIGTVTTLANILREFNPSLKGFSVGTGKETSPNAFLNQAVAGGRAEDLPVQARRLVDLMKNDTRIHFQEDWKIITLFIGGNDLCDFCNDLVHYSPQNFTDNIGKALDILHAEVPRAFVNLVTVLEIVNLRELYQEKKVYCPRMILRSLCPCVLKFDDNSTELATLIEFNKKFQEKTHQLIESGRYDTREDFTVVVQPFFENVDMPKTSEGLPDNSFFAPDCFHFSSKSHSRAASALWNNMLEPVGQKTTRHKFENKINITCPNQVQPFLRTYKNSMQGHGTWLPCRDRAPSALHPTSVHALRPADIQVVAALGDSLTAGNGIGSKPDDLPDVTTQYRGLSYSAGGDGSLENVTTLPNILREFNRNLTGYAVGTGDANDTNAFLNQAVPGAKAEDLMSQVQTLMQKMKDDHRVNFHEDWKVITVLIGGSDLCDYCTDSNLYSAANFVHHLRNALDVLHREVPRVLVNLVDFLNPTIMRQVFLGNPDKCPVQQASVLCNCVLTLRENSQELARLEAFSRAYRSSMRELVGSGRYDTQEDFSVVLQPFFQNIQLPVLADGLPDTSFFAPDCIHPNQKFHSQLARALWTNMLEPLGSKTETLDLRAEMPITCPTQNEPFLRTPRNSNYTYPIKPAIENWGSDFLCTEWKASNSVPTSVHQLRPADIKVVAALGDSLTTAVGARPNNSSDLPTSWRGLSWSIGGDGNLETHTTLPNILKKFNPYLLGFSTSTWEGTAGLNVAAEGARARDMPAQAWDLVERMKNSPDINLEKDWKLVTLFIGVNDLCHYCENPEAHLATEYVQHIQQALDILSEELPRAFVNVVEVMELASLYQGQGGKCAMLAAQNNCTCLRHSQSSLEKQELKKVNWNLQHGISSFSYWHQYTQREDFAVVVQPFFQNTLTPLNERGDTDLTFFSEDCFHFSDRGHAEMAIALWNNMLEPVGRKTTSNNFTHSRAKLKCPSPESPYLYTLRNSRLLPDQAEEAPEVLY

SEQ ID NO: 2887 - protein, 426 aa, synthetic construct
  REGION 1..426: note = PLXDC1 (Q8IUK5) SP+PP+ECD
MRGELWLLVLVLREAARALSPQPGAGHDEGPGSGWAAKGTVRGWNRRARESPGHVSEPDRTQLSQDLGGGTLAMDTLPDNRTRVVEDNHSYYVSRLYGPSEPHSRELWVDVAEANRSQVKIHTILSNTHRQASRVVLSFDFPFYGHPLRQITIATGGFIFMGDVIHRMLTATQYVAPLMANFNPGYSDNSTVVYFDNGTVFVVQWDHVYLQGWEDKGSFTFQAALHHDGRIVFAYKEIPMSVPEISSSQHPVKTGLSDAFMILNPSPDVPESRRRSIFEYHRIELDPSKVTSMSAVEFTPLPTCLQHRSCDACMSSDLTFNCSWCHVLQRCSSGFDRYRQEWMDYGCAQEAEGRMCEDFQDEDHDSASPDTSFSPYDGDLTTTSSSLFIDSLTTEDDTKLNPYAGGDGLQNNLSPKTKGTPVHLGT

SEQ ID NO: 2888 - protein, 454 aa, synthetic construct
  REGION 1..454: note = PLXDC2 (Q6UX71) SP+PP+ECD
MARFPKADLAAAGVMLLCHFFTDQFQFADGKPGDQILDWQYGVTQAFPHTEEEVEVDSHAYSHRWKRNLDFLKAVDTNRASVGQDSPEPRSFTDLLLDDGQDNNTQIEEDTDHNYYISRIYGPSDSASRDLWVNIDQMEKDKVKIHGILSNTHRQAARVNLSFDFPFYGHFLREITVATGGFIYTGEVVHRMLTATQYIAPLMANFDPSVSRNSTVRYFDNGTALVVQWDHVHLQDNYNLGSFTFQATLLMDGRIIFGYKEIPVLVTQISSTNHPVKVGLSDAFVVVHRIQQIPNVRRRTIYEYHRVELQMSKITNISAVEMTPLPTCLQFNRCGPCVSSQIGFNCSWCSKLQRCSSGFDRHRQDWVDSGCPEESKEKMCENTEPVETSSRTTTTVGATTTQFRVLTTTRRAVTSQFPTSLPTEDDTKIALHLKDNGASTDDSAAEKKGGTLHA

SEQ ID NO: 2889 - protein, 1244 aa, synthetic construct
  REGION 1..1244: note = PLXNA1 (Q9UIW2) SP+PP+ECD
MPLPPRSLQVLLLLLLLLLLLPGMWAEAGLPRAGGGSQPPFRTFSASDWGLTHLVVHEQTGEVYVGAVNRIYKLSGNLTLLRAHVTGPVEDNEKCYPPPSVQSCPHGLGSTDNVNKLLLLDYAANRLLACGSASQGICQFLRLDDLFKLGEPHHRKEHYLSSVQEAGSMAGVLIAGPPGQGQAKLFVGTPIDGKSEYFPTLSSRRLMANEEDADMFGFVYQDEFVSSQLKIPSDTLSKFPAFDIYYVYSFRSEQFVYYLTLQLDTQLTSPDAAGEHFFTSKIVRLCVDDPKFYSYVEFPIGCEQAGVEYRLVQDAYLSRPGRALAHQLGLAEDEDVLFTVFAQGQKNRVKPPKESALCLFTLRAIKEKIKERIQSCYRGEGKLSLPWLLNKELGCINSPLQIDDDFCGQDFNQPLGGTVTIEGTPLFVDKDDGLTAVAAYDYRGRTVVFAGTRSGRIRKILVDLSNPGGRPALAYESVVAQEGSPILRDLVLSPNHQYLYAMTEKQVTRVPVESCVQYTSCELCLGSRDPHCGWCVLHSICSRRDACERADEPQRFAADLLQCVQLTVQPRNVSVTMSQVPLVLQAWNVPDLSAGVNCSFEDFTESESVLEDGRIHCRSPSAREVAPITRGQGDQRVVKLYLKSKETGKKFASVDFVFYNCSVHQSCLSCVNGSFPCHWCKYRHVCTHNVADCAFLEGRVNVSEDCPQILPSTQIYVPVGVVKPITLAARNLPQPQSGQRGYECLFHIPGSPARVTALRFNSSSLQCQNSSYSYEGNDVSDLPVNLSVVWNGNFVIDNPQNIQAHLYKCPALRESCGLCLKADPRFECGWCVAERRCSLRHHCAADTPASWMHARHGSSRCTDPKILKLSPETGPRQGGTRLTITGENLGLRFEDVRLGVRVGKVLCSPVESEYISAEQIVCEIGDASSVRAHDALVEVCVRDCSPHYRALSPKRFTFVTPTFYRVSPSRGPLSGGTWIGIEGSHLNAGSDVAVSVGGRPCSFSWRNSREIRCLTPPGQSPGSAPIIININRAQLTNPEVKYNYTEDPTILRIDPEWSINSGGTLLTVTGTNLATVREPRIRAKYGGIERENGCLVYNDTTMVCRAPSVANPVRSPPELGERPDELGFVMDNVRSLLVLNSTSFLYYPDPVLEPLSPTGLLELKPSSPLILKGRNLLPPAPGNSRLNYTVLIGSTPCTLTVSETQLLCEAPNLTGQHKVTVRAGGFEFSPGTLQVYSDSLLTLP

SEQ ID NO: 2890 - protein, 1237 aa, synthetic construct
  REGION 1..1237: note = PLXNA2 (O75051) SP+PP+ECD
MEQRRPWPRALEVDSRSVVLLSVVWVLLAPPAAGMPQFSTFHSENRDWTFNHLTVHQGTGAVYVGAINRVYKLTGNLTIQVAHKTGPEEDNKSCYPPLIVQPCSEVLTLTNNVNKLLIIDYSENRLLACGSLYQGVCKLLRLDDLFILVEPSHKKEHYLSSVNKTGTMYGVIVRSEGEDGKLFIGTAVDGKQDYFPTLSSRKLPRDPESSAMLDYELHSDFVSSLIKIPSDTLALVSHFDIFYIYGFASGGFVYFLTVQPETPEGVAINSAGDLFYTSRIVRLCKDDPKFHSYVSLPFGCTRAGVEYRLLQAAYLAKPGDSLAQAFNITSQDDVLFAIFSKGQKQYHHPPDDSALCAFPIRAINLQIKERLQSCYQGEGNLELNWLLGKDVQCTKAPVPIDDNFCGLDINQPLGGSTPVEGLTLYTTSRDRMTSVASYVYNGYSVVFVGTKSGKLKKIRADGPPHGGVQYEMVSVLKDGSPILRDMAFSIDQRYLYVMSERQVTRVPVESCEQYTTCGECLSSGDPHCGWCALHNMCSRRDKCQQAWEPNRFAASISQCVSLAVHPSSISVSEHSRLLSLVVSDAPDLSAGIACAFGNLTEVEGQVSGSQVICISPGPKDVPVIPLDQDWFGLELQLRSKETGKIFVSTEFKFYNCSAHQLCLSCVNSAFRCHWCKYRNLCTHDPTTCSFQEGRINISEDCPQLVPTEEILIPVGEVKPITLKARNLPQPQSGQRGYECVLNIQGAIHRVPALRFNSSSVQCQNSSYQYDGMDISNLAVDFAVVWNGNFIIDNPQDLKVHLYKCAAQRESCGLCLKADRKFECGWCSGERRCTLHQHCTSPSSPWLDWSSHNVKCSNPQITEILTVSGPPEGGTRVTIHGVNLGLDFSEIAHHVQVAGVPCTPLPGEYIIAEQIVCEMGHALVGTTSGPVRLCIGECKPEFMTKSHQQYTFVNPSVLSLNPIRGPESGGTMVTITGHYLGAGSSVAVYLGNQTCEFYGRSMSEIVCVSPPSSNGLGPVPVSVSVDRAHVDSNLQFEYIDDPRVQRIEPEWSIASGHTPLTITGFNLDVIQEPRIRVKFNGKESVNVCKVVNTTTLTCLAPSLTTDYRPGLDTVERPDEFGFVFNNVQSLLIYNDTKFIYYPNPTFELLSPTGVLDQKPGSPIILKGKNLCPPASGGAKLNYTVLIGETPCAVTVSETQLLCEPPNLTGQHKVMVHVGGMVFSPGSVSVISDSLLTLP

SEQ ID NO: 2891 - protein, 1220 aa, synthetic construct
  REGION 1..1220: note = PLXNA3 (P51805) SP+PP+ECD
MPSVCLLLLLFLAVGGALGNRPFRAFVVTDTTLTHLAVHRVTGEVFVGAVNRVFKLAPNLTELRAHVTGPVEDNARCYPPPSMRVCAHRLAPVDNINKLLLIDYAARRLVACGSIWQGICQFLRLDDLFKLGEPHHRKEHYLSGAQEPDSMAGVIVEQGQGPSKLFVGTAVDGKSEYFPTLSSRKLISDEDSADMFSLVYQDEFVSSQIKIPSDTLSLYPAFDIYYIYGFVSASFVYFLTLQLDTQQTLLDTAGEKFFTSKIVRMCAGDSEFYSYVEFPIGCSWRGVEYRLVQSAHLAKPGLLLAQALGVPADEDVLFTIFSQGQKNRASPPRQTILCLFTLSNINAHIRRRIQSCYRGEGTLALPWLLNKELPCINTPMQINGNFCGLVLNQPLGGLHVIEGLPLLADSTDGMASVAAYTYRQHSVVFIGTRSGSLKKVRVDGFQDAHLYETVPVVDGSPILRDLLFSPDHRHIYLLSEKQVSQLPVETCEQYQSCAACLGSGDPHCGWCVLRHRCCREGACLGASAPHGFAEELSKCVQVRVRPNNVSVTSPGVQLTVTLHNVPDLSAGVSCAFEAAAENEAVLLPSGELLCPSPSLQELRALTRGHGATRTVRLQLLSKETGVRFAGADFVFYNCSVLQSCMSCVGSPYPCHWCKYRHTCTSRPHECSFQEGRVHSPEGCPEILPSGDLLIPVGVMQPLTLRAKNLPQPQSGQKNYECVVRVQGRQQRVPAVRFNSSSVQCQNASYSYEGDEHGDTELDFSVVWDGDFPIDKPPSFRALLYKCWAQRPSCGLCLKADPRFNCGWCISEHRCQLRTHCPAPKTNWMHLSQKGTRCSHPRITQIHPLVGPKEGGTRVTIVGDNLGLLSREVGLRVAGVRCNSIPAEYISAERIVCEMEESLVPSPPPGPVELCVGDCSADFRTQSEQVYSFVTPTFDQVSPSRGPASGGTRLTISGSSLDAGSRVTVTVRDSECQFVRRDAKAIVCISPLSTLGPSQAPITLAIDRANISSPGLIYTYTQDPTVTRLEPTWSIINGSTAITVSGTHLLTVQEPRVRAKYRGIETTNTCQVINDTAMLCKAPGIFLGRPQPRAQGEHPDEFGFLLDHVQTARSLNRSSFTYYPDPSFEPLGPSGVLDVKPGSHVVLKGKNLIPAAAGSSRLNYTVLIGGQPCSLTVSDTQLLCDSPSQTGRQPVMVLVGGLEFWLGTLHISAERALTLPA

SEQ ID NO: 2892 - protein, 1237 aa, synthetic construct
  REGION 1..1237: note = PLXNA4 (Q9HCM2) SP+PP+ECD
MKAMPWNWTCLLSHLLMVGMGSSTLLTRQPAPLSQKQRSFVTFRGEPAEGFNHLVVDERTGHIYLGAVNRIYKLSSDLKVLVTHETGPDEDNPKCYPPRIVQTCNEPLTTTNNVNKMLLIDYKENRLIACGSLYQGICKLLRLEDLFKLGEPYHKKEHYLSGVNESGSVFGVIVSYSNLDDKLFIATAVDGKPEYFPTISSRKLTKNSEADGMFAYVFHDEFVASMIKIPSDTFTIIPDFDIYYVYGFSSGNFVYFLTLQPEMVSPPGSTTKEQVYTSKLVRLCKEDTAFNSYVEVPIGCERSGVEYRLLQAAYLSKAGAVLGRTLGVHPDDDLLFTVFSKGQKRKMKSLDESALCIFILKQINDRIKERLQSCYRGEGTLDLAWLKVKDIPCSSALLTIDDNFCGLDMNAPLGVSDMVRGIPVFTEDRDRMTSVIAYVYKNHSLAFVGTKSGKLKKIRVDGPRGNALQYETVQVVDPGPVLRDMAFSKDHEQLYIMSERQLTRVPVESCGQYQSCGECLGSGDPHCGWCVLHNTCTRKERCERSKEPRRFASEMKQCVRLTVHPNNISVSQYNVLLVLETYNVPELSAGVNCTFEDLSEMDGLVVGNQIQCYSPAAKEVPRIITENGDHHVVQLQLKSKETGMTFASTSFVFYNCSVHNSCLSCVESPYRCHWCKYRHVCTHDPKTCSFQEGRVKLPEDCPQLLRVDKILVPVEVIKPITLKAKNLPQPQSGQRGYECILNIQGSEQRVPALRFNSSSVQCQNTSYSYEGMEINNLPVELTVVWNGHFNIDNPAQNKVHLYKCGAMRESCGLCLKADPDFACGWCQGPGQCTLRQHCPAQESQWLELSGAKSKCTNPRITEIIPVTGPREGGTKVTIRGENLGLEFRDIASHVKVAGVECSPLVDGYIPAEQIVCEMGEAKPSQHAGFVEICVAVCRPEFMARSSQLYYFMTLTLSDLKPSRGPMSGGTQVTITGTNLNAGSNVVVMFGKQPCLFHRRSPSYIVCNTTSSDEVLEMKVSVQVDRAKIHQDLVFQYVEDPTIVRIEPEWSIVSGNTPIAVWGTHLDLIQNPQIRAKHGGKEHINICEVLNATEMTCQAPALALGPDHQSDLTERPEEFGFILDNVQSLLILNKTNFTYYPNPVFEAFGPSGILELKPGTPIILKGKNLIPPVAGGNVKLNYTVLVGEKPCTVTVSDVQLLCESPNLIGRHKVMARVGGMEYSPGMVYIAPDSPLSLP

SEQ ID NO: 2893 - protein, 1490 aa, synthetic construct
  REGION 1..1490: note = PLXNB1 (O43157) SP+PP+ECD
MPALGPALLQALWAGWVLTLQPLPPTAFTPNGTYLQHLARDPTSGTLYLGATNFLFQLSPGLQLEATVSTGPVLDSRDCLPPVMPDECPQAQPTNNPNQLLLVSPGALVVCGSVHQGVCEQRRLGQLEQLLLRPERPGDTQYVAANDPAVSTVGLVAQGLAGEPLLFVGRGYTSRGVGGGIPPITTRALWPPDPQAAFSYEETAKLAVGRLSEYSHHFVSAFARGASAYFLFLRRDLQAQSRAFRAYVSRVCLRDQHYYSYVELPLACEGGRYGLIQAAAVATSREVAHGEVLFAAFSSAAPPTVGRPPSAAAGASGASALCAFPLDEVDRLANRTRDACYTREGRAEDGTEVAYIEYDVNSDCAQLPVDTLDAYPCGSDHTPSPMASRVPLEATPILEWPGIQLTAVAVTMEDGHTIAFLGDSQGQLHRVYLGPGSDGHPYSTQSIQQGSAVSRDLTFDGTFEHLYVMTQSTLLKVPVASCAQHLDCASCLAHRDPYCGWCVLLGRCSRRSECSRGQGPEQWLWSFQPELGCLQVAAMSPANISREETREVFLSVPDLPPLWPGESYSCHFGEHQSPALLTGSGVMCPSPDPSEAPVLPRGADYVSVSVELRFGAVVIAKTSLSFYDCVAVTELRPSAQCQACVSSRWGCNWCVWQHLCTHKASCDAGPMVASHQSPLVSPDPPARGGPSPSPPTAPKALATPAPDTLPVEPGAPSTATASDISPGASPSLLSPWGPWAGSGSISSPGSTGSPLHEEPSPPSPQNGPGTAVPAPTDFRPSATPEDLLASPLSPSEVAAVPPADPGPEALHPTVPLDLPPATVPATTFPGAMGSVKPALDWLTREGGELPEADEWTGGDAPAFSTSTLLSGDGDSAELEGPPAPLILPSSLDYQYDTPGLWELEEATLGASSCPCVESVQGSTLMPVHVEREIRLLGRNLHLFQDGPGDNECVMELEGLEVVVEARVECEPPPDTQCHVTCQQHQLSYEALQPELRVGLFLRRAGRLRVDSAEGLHVVLYDCSVGHGDCSRCQTAMPQYGCVWCEGERPRCVTREACGEAEAVATQCPAPLIHSVEPLTGPVDGGTRVTIRGSNLGQHVQDVLGMVTVAGVPCAVDAQEYEVSSSLVCITGASGEEVAGATAVEVPGRGRGVSEHDFAYQDPKVHSIFPARGPRAGGTRLTLNGSKLLTGRLEDIRVVVGDQPCHLLPEQQSEQLRCETSPRPTPATLPVAVWFGATERRLQRGQFKYTLDPNITSAGPTKSFLSGGREICVRGQNLDVVQTPRIRVTVVSRMLQPSQGLGRRRRVVPETACSLGPSCSSQQFEEPCHVNSSQLITCRTPALPGLPEDPWVRVEFILDNLVFDFATLNPTPFSYEADPTLQPLNPEDPTMPFRHKPGSVFSVEGENLDLAMSKEEVVAMIGDGPCVVKTLTRHHLYCEPPVEQPLPRHHALREAPDSLPEFTVQMGNLRFSLGHVQYDGESPGAFPVAAQ

SEQ ID NO: 2894 - protein, 1197 aa, synthetic construct
  REGION 1..1197: note = PLXNB2 (O15031) SP+PP+ECD
MALQLWALTLLGLLGAGASLRPRKLDFFRSEKELNHLAVDEASGVVYLGAVNALYQLDAKLQLEQQVATGPALDNKKCTPPIEASQCHEAEMTDNVNQLLLLDPPRKRLVECGSLFKGICALRALSNISLRLFYEDGSGEKSFVASNDEGVATVGLVSSTGPGGDRVLFVGKGNGPHDNGIIVSTRLLDRTDSREAFEAYTDHATYKAGYLSTNTQQFVAAFEDGPYVFFVFNQQDKHPARNRTLLARMCREDPNYYSYLEMDLQCRDPDIHAAAFGTCLAASVAAPGSGRVLYAVFSRDSRSSGGPGAGLCLFPLDKVHAKMEANRNACYTGTREARDIFYKPFHGDIQCGGHAPGSSKSFPCGSEHLPYPLGSRDGLRGTAVLQRGGLNLTAVTVAAENNHTVAFLGTSDGRILKVYLTPDGTSSEYDSILVEINKRVKRDLVLSGDLGSLYAMTQDKVFRLPVQECLSYPTCTQCRDSQDPYCGWCVVEGRCTRKAECPRAEEASHWLWSRSKSCVAVTSAQPQNMSRRAQGEVQLTVSPLPALSEEDELLCLFGESPPHPARVEGEAVICNSPSSIPVTPPGQDHVAVTIQLLLRRGNIFLTSYQYPFYDCRQAMSLEENLPCISCVSNRWTCQWDLRYHECREASPNPEDGIVRAHMEDSCPQFLGPSPLVIPMNHETDVNFQGKNLDTVKGSSLHVGSDLLKFMEPVTMQESGTFAFRTPKLSHDANETLPLHLYVKSYGKNIDSKLHVTLYNCSFGRSDCSLCRAANPDYRCAWCGGQSRCVYEALCNTTSECPPPVITRIQPETGPLGGGIRITILGSNLGVQAGDIQRISVAGRNCSFQPERYSVSTRIVCVIEAAETPFTGGVEVDVFGKLGRSPPNVQFTFQQPKPLSVEPQQGPQAGGTTLTIHGTHLDTGSQEDVRVTLNGVPCKVTKFGAQLQCVTGPQATRGQMLLEVSYGGSPVPNPGIFFTYRENPVLRAFEPLRSFASGGRSINVTGQGFSLIQRFAMVVIAEPLQSWQPPREAESLQPMTVVGTDYVFHNDTKVVFLSPAVPEEPEAYNLTVLIEMDGHRALLRTEAGAFEYVPDPTFENFTGGVKKQVNKLIHARGTNLNKAMTLQEAEAFVGAERCTMKTLTETDLYCEPPEVQPPPKRRQKRDTTHNLPEFIVKFGSREWVLGRVEYDTRVSDVP

SEQ ID NO: 2895 - protein, 1255 aa, synthetic construct
  REGION 1..1255: note = PLXNB3 (Q9ULL4) SP+PP+ECD
MCHAAQETPLLHHFMAPVMARWPPFGLCLLLLLLSPPPLPLTGAHRFSAPNTTLNHLALAPGRGTLYVGAVNRLFQLSPELQLEAVAVTGPVIDSPDCVPFRDPAECPQAQLTDNANQLLLVSSRAQELVACGQVRQGVCETRRLGDVAEVLYQAEDPGDGQFVAANTPGVATVGLVVPLPGRDLLLVARGLAGKLSAGVPPLAIRQLAGSQPFSSEGLGRLVVGDFSDYNNSYVGAFADARSAYFVFRRRGARAQAEYRSYVARVCLGDTNLYSYVEVPLACQGQGLIQAAFLAPGTLLGVFAAGPRGTQAALCAFPMVELGASMEQARRLCYTAGGRGPSGAEEATVEYGVTSRCVTLPLDSPESYPCGDEHTPSPIAGRQPLEVQPLLKLGQPVSAVAALQADGHMIAFLGDTQGQLYKVFLHGSQGQVYHSQQVGPPGSAISPDLLLDSSGSHLYVLTAHQVDRIPVAACPQFPDCASCLQAQDPLCGWCVLQGRCTRKGQCGRAGQLNQWLWSYEEDSHCLHIQSLLPGHHPRQEQGQVTLSVPRLPILDADEYFHCAFGDYDSLAHVEGPHVACVTPPQDQVPLNPPGTDHVTVPLALMFEDVTVAATNFSFYDCSAVQALEAAAPCRACVGSIWRCHWCPQSSHCVYGEHCPEGERTIYSAQEVDIQVRGPGACPQVEGLAGPHLVPVGWESHLALRVRNLQHFRGLPASFHCWLELPGELRGLPATLEETAGDSGLIHCQAHQFYPSMSQRELPVPIYVTQGEAQRLDNTHALYVILYDCAMGHPDCSHCQAANRSLGCLWCADGQPACRYGPLCPPGAVELLCPAPSIDAVEPLTGPPEGGLALTILGSNLGRAFADVQYAVSVASRPCNPEPSLYRTSARIVCVTSPAPNGTTGPVRVAIKSQPPGISSQHFTYQDPVLLSLSPRWGPQAGGTQLTIRGQHLQTGGNTSAFVGGQPCPILEPVCPEAIVCRTRPQAAPGEAAVLVVFGHAQRTLLASPFRYTANPQLVAAEPSASFRGGGRLIRVRGTGLDVVQRPLLSVWLEADAEVQASRAQPQDPQPRRSCGAPAADPQACIQLGGGLLQCSTVCSVNSSSLLLCRSPAVPDRAHPQRVFFTLDNVQVDFASASGGQGFLYQPNPRLAPLSREGPARPYRLKPGHVLDVEGEGLNLGISKEEVRVHIGRGECLVKTLTRTHLYCEPPAHAPQPANGSGLPQFVVQMGNVQLALGPVQYEAEPPLSAFPVEAQ

SEQ ID NO: 2896 - protein, 944 aa, synthetic construct
  REGION 1..944: note = PLXNC1 (O60486) SP+PP+ECD
MEVSRRKAPPRPPRPAAPLPLLAYLLALAAPGRGADEPVWRSEQAIGAIAASQEDGVFVASGSCLDQLDYSLEHSLSRLYRDQAGNCTEPVSLAPPARPRPGSSFSKLLLPYREGAAGLGGLLLTGWTFDRGACEVRPLGNLSRNSLRNGTEVVSCHPQGSTAGVVYRAGRNNRWYLAVAATYVLPEPETASRCNPAASDHDTAIALKDTEGRSLATQELGRLKLCEGAGSLHFVDAFLWNGSIYFPYYPYNYTSGAATGWPSMARIAQSTEVLFQGQASLDCGHGHPDGRRLLLSSSLVEALDVWAGVFSAAAGEGQERRSPTTTALCLFRMSEIQARAKRVSWDFKTAESHCKEGDQPERVQPIASSTLIHSDLTSVYGTVVMNRTVLFLGTGDGQLLKVILGENLTSNCPEVIYEIKEETPVFYKLVPDPVKNIYIYLTAGKEVRRIRVANCNKHKSCSECLTATDPHCGWCHSLQRCTFQGDCVHSENLENWLDISSGAKKCPKIQIIRSSKEKTTVTMVGSFSPRHSKCMVKNVDSSRELCQNKSQPNRTCTCSIPTRATYKDVSVVNVMFSFGSWNLSDRFNFTNCSSLKECPACVETGCAWCKSARRCIHPFTACDPSDYERNQEQCPVAVEKTSGGGRPKENKGNRTNQALQVFYIKSIEPQKVSTLGKSNVIVTGANFTRASNITMILKGTSTCDKDVIQVSHVLNDTHMKFSLPSSRKEMKDVCIQFDGGNCSSVGSLSYIALPHCSLIFPATTWISGGQNITMMGRNFDVIDNLIISHELKGNINVSEYCVATYCGFLAPSLKSSKVRTNVTVKLRVQDTYLDCGTLQYREDPRFTGYRVESEVDTELEVKIQKENDNFNISKKDIEITLFHGENGQLNCSFENITRNQDLTTILCKIKGIKTASTIANSSKKVRVKLGNLELYVEQESVPST

SEQ ID NO: 2897 - protein, 1271 aa, synthetic construct
  REGION 1..1271: note = PLXND1 (Q9Y4D7) SP+PP+ECD
MAPRAAGGAPLSARAAAASPPPFQTPPRCPVPLLLLLLLGAARAGALEIQRRFPSPTPTNNFALDGAAGTVYLAAVNRLYQLSGANLSLEAEAAVGPVPDSPLCHAPQLPQASCEHPRRLTDNYNKILQLDPGQGLVVVCGSIYQGFCQLRRRGNISAVAVRFPPAAPPAEPVTVFPSMLNVAANHPNASTVGLVLPPAAGAGGSRLLVGATYTGYGSSFFPRNRSLEDHRFENTPEIAIRSLDTRGDLAKLFTFDLNPSDDNILKIKQGAKEQHKLGFVSAFLHPSDPPPGAQSYAYLALNSEARAGDKESQARSLLARICLPHGAGGDAKKLTESYIQLGLQCAGGAGRGDLYSRLVSVFPARERLFAVFERPQGSPAARAAPAALCAFRFADVRAAIRAARTACFVEPAPDVVAVLDSVVQGTGPACERKLNIQLQPEQLDCGAAHLQHPLSILQPLKATPVFRAPGLTSVAVASVNNYTAVFLGTVNGRLLKINLNESMQVVSRRVVTVAYGEPVHHVMQFDPADSGYLYLMTSHQMARVKVAACNVHSTCGDCVGAADAYCGWCALETRCTLQQDCTNSSQQHFWTSASEGPSRCPAMTVLPSEIDVRQEYPGMILQISGSLPSLSGMEMACDYGNNIRTVARVPGPAFGHQIAYCNLLPRDQFPPFPPNQDHVTVEMSVRVNGRNIVKANFTIYDCSRTAQVYPHTACTSCLSAQWPCFWCSQQHSCVSNQSRCEASPNPTSPQDCPRTLLSPLAPVPTGGSQNILVPLANTAFFQGAALECSFGLEEIFEAVWVNESVVRCDQVVLHTTRKSQVFPLSLQLKGRPARFLDSPEPMTVMVYNCAMGSPDCSQCLGREDLGHLCMWSDGCRLRGPLQPMAGTCPAPEIHAIEPLSGPLDGGTLLTIRGRNLGRRLSDVAHGVWIGGVACEPLPDRYTVSEEIVCVTGPAPGPLSGVVTVNASKEGKSRDRFSYVLPLVHSLEPTMGPKAGGTRITIHGNDLHVGSELQVLVNDTDPCTELMRTDTSIACTMPEGALPAPVPVCVRFERRGCVHGNLTFWYMQNPVITAISPRRSPVSGGRTITVAGERFHMVQNVSMAVHHIGREPTLCKVLNSTLITCPSPGALSNASAPVDFFINGRAYADEVAVAEELLDPEEAQRGSRFRLDYLPNPQFSTAKREKWIKHHPGEPLTLVIHKEQDSLGLQSHEYRVKIGQVSCDIQIVSDRIIHCSVNESLGAAVGQLPITIQVGNFNQTIATLQLGGSETA

SEQ ID NO: 2898 - protein, 467 aa, synthetic construct
  REGION 1..467: note = PMEL (P40967) SP+PP+ECD
MDLVLKRCLLHLAVIGALLAVGATKVPRNQDWLGVSRQLRTKAWNRQLYPEWTEAQRLDCWRGGQVSLKVSNDGPTLIGANASFSIALNFPGSQKVLPDGQVIWVNNTIINGSQVWGGQPVYPQETDDACIFPDGGPCPSGSWSQKRSFVYVWKTWGQYWQVLGGPVSGLSIGTGRAMLGTHTMEVTVYHRRGSRSYVPLAHSSSAFTITDQVPFSVSVSQLRALDGGNKHFLRNQPLTFALQLHDPSGYLAEADLSYTWDFGDSSGTLISRALVVTHTYLEPGPVTAQVVLQAAIPLTSCGSSPVPGTTDGHRPTAEAPNTTAGQVPTTEVVGTTPGQAPTAEPSGTTSVQVPTTEVISTAPVQMPTAESTGMTPEKVPVSEVMGTTLAEMSTPEATGMTPAEVSIVVLSGTTAAQVTTTEWVETTARELPIPEPEGPDASSIMSTESITGSLGPLLDGTATLRLV

SEQ ID NO: 2899 - protein, 461 aa, synthetic construct
  REGION 1..461: note = PODXL (O00592) SP+PP+ECD
MRCALALSALLLLLSTPPLLPSSPSPSPSPSQNATQTTTDSSNKTAPTPASSVTIMATDTAQQSTVPTSKANEILASVKATTLGVSSDSPGTTTLAQQVSGPVNTTVARGGGSGNPTTTIESPKSTKSADTTTVATSTATAKPNTTSSQNGAEDTTNSGGKSSHSVTTDLTSTKAEHLTTPHPTSPLSPRQPTSTHPVATPTSSGHDHLMKISSSSSTVAIPGYTFTSPGMTTTLLETVFHHVSQAGLELLTSGDLPTLASQSAGITASSVISQRTQQTSSQMPASSTAPSSQETVQPTSPATALRTPTLPETMSSSPTAASTTHRYPKTPSPTVAHESNWAKCEDLETQTQSEKQLVLNLTGNTLCAGGASDEKLISLICRAVKATFNPAQDKCGIRLASVPGSQTVVVKEITIHTKLPAKDVYERLKDKWDELKEAGVSDMKLGDQGPPEEAEDRFSMP

SEQ ID NO: 2900 - protein, 500 aa, synthetic construct
  REGION 1..500: note = PODXL2 (Q9NZ53) SP+PP+ECD
MGRLLRAARLPPLLSPLLLLLVGGAFLGACVAGSDEPGPEGLTSTSLLDLLLPTGLEPLDSEEPSETMGLGAGLGAPGSGFPSEENEESRILQPPQYFWEEEEELNDSSLDLGPTADYVFPDLTEKAGSIEDTSQAQELPNLPSPLPKMNLVEPPWHMPPREEEEEEEEEEEREKEEVEKQEEEEEEELLPVNGSQEEAKPQVRDFSLTSSSQTPGATKSRHEDSGDQASSGVEVESSMGPSLLLPSVTPTTVTPGDQDSTSQEAEATVLPAAGLGVEFEAPQEASEEATAGAAGLSGQHEEVPALPSFPQTTAPSGAEHPDEDPLGSRTSASSPLAPGDMELTPSSATLGQEDLNQQLLEGQAAEAQSRIPWDSTQVICKDWSNLAGKNYIILNMTENIDCEVFRQHRGPQLLALVEEVLPRHGSGHHGAWHISLSKPSEKEQHLLMTLVGEQGVVPTQDVLSMLGDIRRSLEEIGIQNYSTTSSCQARASQVRSDYGT

SEQ ID NO: 2901 - protein, 92 aa, synthetic construct
  REGION 1..92: note = PRIMA1 (Q86XR5) SP+PP+ECD
MLLRDLVLRRGCCWSSLLLHCALHPLWGFVQVTHGEPQKSCSKVTDSCRHVCQCRPPPPLPPPPPPPPPPRLLSAPAPNSTSCPTEESWWSG

SEQ ID NO: 2902 - protein, 234 aa, synthetic construct
  REGION 1..234: note = PRLR (P16471) SP+PP+ECD
MKENVASATVFTLLLFLNTCLLNGQLPPGKPEIFKCRSPNKETFTCWWRPGTDGGLPTNYSLTYHREGETLMHECPDYITGGPNSCHFGKQYTSMWRTYIMMVNATNQMGSSFSDELYVDVTYIVQPDPPLELAVEVKQPEDRKPYLWIKWSPPTLIDLKTGWFTLLYEIRLKPEKAAEWEIHFAGQQTEFKILSLHPGQKYLVQVRCKPDHGYWSAWSPATFIQIPSDFTMND

SEQ ID NO: 2903 - protein, 210 aa, synthetic construct
  REGION 1..210: note = PROCR (Q9UNN8) SP+PP+ECD
MLTTLLPILLLSGWAFCSQDASDGLQRLHMLQISYFRDPYHVWYQGNASLGGHLTHVLEGPDTNTTIIQLQPLQEPESWARTQSGLQSYLLQFHGLVRLVHQERTLAFPLTIRCFLGCELPPEGSRAHVFFEVAVNGSSFVSFRPERALWQADTQVTSGVVTFTLQQLNAYNRTRYELREFLEDTCVQYVQKHISAENTKGSQTSRSYTS

SEQ ID NO: 2904 - protein, 319 aa, synthetic construct
  REGION 1..319: note = PRSS8 (Q16651) SP+PP+ECD
MAQKGVLGPGQLGAVAILLYLGLLRSGTGAEGAEAPCGVAPQARITGGSSAVAGQWPWQVSITYEGVHVCGGSLVSEQWVLSAAHCFPSEHHKEAYEVKLGAHQLDSYSEDAKVSTLKDIIPHPSYLQEGSQGDIALLQLSRPITFSRYIRPICLPAANASFPNGLHCTVTGWGHVAPSVSLLTPKPLQQLEVPLISRETCNCLYNIDAKPEEPHFVQEDMVCAGYVEGGKDACQGDSGGPLSCPVEGLWYLTGIVSWGDACGARNRPGVYTLASSYASWIQSKVTELQPRVVPQTQESQPDSNLCGSHLAFSSAPAQG

SEQ ID NO: 2905 - protein, 949 aa, synthetic construct
  REGION 1..949: note = PRTG (Q2VWP7) SP+PP+ECD
MAPPLRPLARLRPPGMLLRALLLLLLLSPLPGVWCFSELSFVKEPQDVTVTRKDPVVLDCQAHGEVPIKVTWLKNGAKMSENKRIEVLSNGSLYISEVEGRRGEQSDEGFYQCLAMNKYGAILSQKAHLALSTISAFEVQPISTEVHEGGVARFACKISSHPPAVITWEFNRTTLPMTMDRITALPTGVLQIYDVSQRDSGNYRCIAATVAHRRKSMEASLTVIPAKESKSFHTPTIIAGPQNITTSLHQTVVLECMATGNPKPIISWSRLDHKSIDVFNTRVLGNGNLMISDVRLQHAGVYVCRATTPGTRNFTVAMATLTVLAPPSFVEWPESLTRPRAGTARFVCQAEGIPSPKMSWLKNGRKIHSNGRIKMYNSKLVINQIIPEDDAIYQCMAENSQGSILSRARLTVVMSEDRPSAPYNVHAETMSSSAILLAWERPLYNSDKVIAYSVHYMKAEGLNNEEYQVVIGNDTTHYIIDDLEPASNYTFYIVAYMPMGASQMSDHVTQNTLEDVPLRPPEISLTSRSPTDILISWLPIPAKYRRGQVVLYRLSFRLSTENSIQVLELPGTTHEYLLEGLKPDSVYLVRITAATRVGLGESSVWTSHRTPKATSVKAPKSPELHLEPLNCTTISVRWQQDVEDTAAIQGYKLYYKEEGQQENGPIFLDTKDLLYTLSGLDPRRKYHVRLLAYNNIDDGYQADQTVSTPGCVSVRDRMVPPPPPPHHLYAKANTSSSIFLHWRRPAFTAAQIINYTIRCNPVGLQNASLVLYLQTSETHMLVQGLEPNTKYEFAVRLHVDQLSSPWSPVVYHSTLPEAPAGPPVGVKVTLIEDDTALVSWKPPDGPETVVTRYTILYASRKAWIAGEWQVLHREGAITMALLENLVAGNVYIVKISASNEVGEGPFSNSVELAVLPKETSESNQRPKRLDSADAKVYSGYYHLDQKSMT

SEQ ID NO: 2906 - protein, 146 aa, synthetic construct
  REGION 1..146: note = PTCRA (Q6ISU1) SP+PP+ECD
MAGTWLLLLLALGCPALPTGVGGTPFPSLAPPIMLLVDGKQQMVVVCLVLDVAPPGLDSPIWFSAGNGSALDAFTYGPSPATDGTWTNLAHLSLPSEELASWEPLVCHTGPGAEGHSRSTQPMHLSGEASTARTCPQEPLRGTPGG

SEQ ID NO: 2907 - protein, 832 aa, synthetic construct
  REGION 1..832: note = PTGFRN (Q9P2B2) SP+PP+ECD
MGRLASRPLLLALLSLALCRGRVVRVPTATLVRVVGTELVIPCNVSDYDGPSEQNFDWSFSSLGSSFVELASTWEVGFPAQLYQERLQRGEILLRRTANDAVELHIKNVQPSDQGHYKCSTPSTDATVQGNYEDTVQVKVLADSLHVGPSARPPPSLSLREGEPFELRCTAASASPLHTHLALLWEVHRGPARRSVLALTHEGRFHPGLGYEQRYHSGDVRLDTVGSDAYRLSVSRALSADQGSYRCIVSEWIAEQGNWQEIQEKAVEVATVVIQPSVLRAAVPKNVSVAEGKELDLTCNITTDRADDVRPEVTWSFSRMPDSTLPGSRVLARLDRDSLVHSSPHVALSHVDARSYHLLVRDVSKENSGYYYCHVSLWAPGHNRSWHKVAEAVSSPAGVGVTWLEPDYQVYLNASKVPGFADDPTELACRVVDTKSGEANVRFTVSWYYRMNRRSDNVVTSELLAVMDGDWTLKYGERSKQRAQDGDFIFSKEHTDTFNFRIQRTTEEDRGNYYCVVSAWTKQRNNSWVKSKDVFSKPVNIFWALEDSVLVVKARQPKPFFAAGNTFEMTCKVSSKNIKSPRYSVLIMAEKPVGDLSSPNETKYIISLDQDSVVKLENWTDASRVDGVVLEKVQEDEFRYRMYQTQVSDAGLYRCMVTAWSPVRGSLWREAATSLSNPIEIDFQTSGPIFNASVHSDTPSVIRGDLIKLFCIITVEGAALDPDDMAFDVSWFAVHSFGLDKAPVLLSSLDRKGIVTTSRRDWKSDLSLERVSVLEFLLQVHGSEDQDFGNYYCSVTPWVKSPTGSWQKEAEIHSKPVFITVKMDVLNAFKYP

SEQ ID NO: 2908 - protein, 704 aa, synthetic construct
  REGION 1..704: note = PTK7 (Q13308) SP+PP+ECD
MGAARGSPARPRRLPLLSVLLLPLLGGTQTAIVFIKQPSSQDALQGRRALLRCEVEAPGPVHVYWLLDGAPVQDTERRFAQGSSLSFAAVDRLQDSGTFQCVARDDVTGEEARSANASFNIKWIEAGPVVLKHPASEAEIQPQTQVTLRCHIDGHPRPTYQWFRDGTPLSDGQSNHTVSSKERNLTLRPAGPEHSGLYSCCAHSAFGQACSSQNFTLSIADESFARVVLAPQDVVVARYEEAMFHCQFSAQPPPSLQWLFEDETPITNRSRPPHLRRATVFANGSLLLTQVRPRNAGIYRCIGQGQRGPPIILEATLHLAEIEDMPLFEPRVFTAGSEERVTCLPPKGLPEPSVWWEHAGVRLPTHGRVYQKGHELVLANIAESDAGVYTCHAANLAGQRRQDVNITVATVPSWLKKPQDSQLEEGKPGYLDCLTQATPKPTVVWYRNQMLISEDSRFEVFKNGTLRINSVEVYDGTWYRCMSSTPAGSIEAQARVQVLEKLKFTPPPQPQQCMEFDKEATVPCSATGREKPTIKWERADGSSLPEWVTDNAGTLHFARVTRDDAGNYTCIASNGPQGQIRAHVQLTVAVFITFKVEPERTTVYQGHTALLQCEAQGDPKPLIQWKGKDRILDPTKLGPRMHIFQNGSLVIHDVAPEDSGRYTCIAGNSCNIKHTEAPLYVVDKPVPEESEGPGSPPPYKMIQT

SEQ ID NO: 2909 - protein, 151 aa, synthetic construct
  REGION 1..151: note = PTPRA (P18433) SP+PP+ECD
MDSWFILVLLGSGLICVSANNATTVAPSVGITRLINSSTAEPVKEEAKTSNPTSSLTSLSVAPTFSPNITLGPTYLTTVNSSDSDNGTTRTASTNSIGITISPNGTWLPDNQFTDARTEPWEGNSSTAATTPETFPPSGNSDSKDRRDETP

SEQ ID NO: 2910 - protein, 1621 aa, synthetic construct
  REGION 1..1621: note = PTPRB (P23467) SP+PP+ECD
MLSHGAGLALWITLSLLQTGLAEPERCNFTLAESKASSHSVSIQWRILGSPCNFSLIYSSDTLGAALCPTFRIDNTTYGCNLQDLQAGTIYNFRIISLDEERTVVLQTDPLPPARFGVSKEKTTSTSLHVWWTPSSGKVTSYEVQLFDENNQKIQGVQIQESTSWNEYTFFNLTAGSKYNIAITAVSGGKRSFSVYTNGSTVPSPVKDIGISTKANSLLISWSHGSGNVERYRLMLMDKGILVHGGVVDKHATSYAFHGLTPGYLYNLTVMTEAAGLQNYRWKLVRTAPMEVSNLKVTNDGSLTSLKVKWQRPPGNVDSYNITLSHKGTIKESRVLAPWITETHFKELVPGRLYQVTVSCVSGELSAQKMAVGRTFPDKVANLEANNNGRMRSLVVSWSPPAGDWEQYRILLFNDSVVLLNITVGKEETQYVMDDTGLVPGRQYEVEVIVESGNLKNSERCQGRTVPLAVLQLRVKHANETSLSIMWQTPVAEWEKYIISLADRDLLLIHKSLSKDAKEFTFTDLVPGRKYMATVTSISGDLKNSSSVKGRTVPAQVTDLHVANQGMTSSLFTNWTQAQGDVEFYQVLLIHENVVIKNESISSETSRYSFHSLKSGSLYSVVVTTVSGGISSRQVVVEGRTVPSSVSGVTVNNSGRNDYLSVSWLLAPGDVDNYEVTLSHDGKVVQSLVIAKSVRECSFSSLTPGRLYTVTITTRSGKYENHSFSQERTVPDKVQGVSVSNSARSDYLRVSWVHATGDFDHYEVTIKNKNNFIQTKSIPKSENECVFVQLVPGRLYSVTVTTKSGQYEANEQGNGRTIPEPVKDLTLRNRSTEDLHVTWSGANGDVDQYEIQLLFNDMKVFPPFHLVNTATEYRFTSLTPGRQYKILVLTISGDVQQSAFIEGFTVPSAVKNIHISPNGATDSLTVNWTPGGGDVDSYTVSAFRHSQKVDSQTIPKHVFEHTFHRLEAGEQYQIMIASVSGSLKNQINVVGRTVPASVQGVIADNAYSSYSLIVSWQKAAGVAERYDILLLTENGILLRNTSEPATTKQHKFEDLTPGKKYKIQILTVSGGLFSKEAQTEGRTVPAAVTDLRITENSTRHLSFRWTASEGELSWYNIFLYNPDGNLQERAQVDPLVQSFSFQNLLQGRMYKMVIVTHSGELSNESFIFGRTVPASVSHLRGSNRNTTDSLWFNWSPASGDFDFYELILYNPNGTKKENWKDKDLTEWRFQGLVPGRKYVLWVVTHSGDLSNKVTAESRTAPSPPSLMSFADIANTSLAITWKGPPDWTDYNDFELQWLPRDALTVFNPYNNRKSEGRIVYGLRPGRSYQFNVKTVSGDSWKTYSKPIFGSVRTKPDKIQNLHCRPQNSTAIACSWIPPDSDFDGYSIECRKMDTQEVEFSRKLEKEKSLLNIMMLVPHKRYLVSIKVQSAGMTSEVVEDSTITMIDRPPPPPPHIRVNEKDVLISKSSINFTVNCSWFSDTNGAVKYFTVVVREADGSDELKPEQQHPLPSYLEYRHNASIRVYQTNYFASKCAENPNSNSKSFNIKLGAEMESLGGKCDPTQQKFCDGPLKPHTAYRISIRAFTQLFDEDLKEFTKPLYSDTFFSLPITTESEPLFGAIE

SEQ ID NO: 2911 - protein, 577 aa, synthetic construct
  REGION 1..577: note = PTPRC (P08575) SP+PP+ECD
MTMYLWLKLLAFGFAFLDTEVFVTGQSPTPSPTGLTTAKMPSVPLSSDPLPTHTTAFSPASTFERENDFSETTTSLSPDNTSTQVSPDSLDNASAFNTTGVSSVQTPHLPTHADSQTPSAGTDTQTFSGSAANAKLNPTPGSNAISDVPGERSTASTFPTDPVSPLTTTLSLAHHSSAALPARTSNTTITANTSDAYLNASETTTLSPSGSAVISTTTIATTPSKPTCDEKYANITVDYLYNKETKLFTAKLNVNENVECGNNTCTNNEVHNLTECKNASVSISHNSCTAPDKTLILDVPPGVEKFQLHDCTQVEKADTTICLKWKNIETFTCDTQNITYRFQCGNMIFDNKEIKLENLEPEHEYKCDSEILYNNHKFTNASKIIKTDFGSPGEPQIIFCRSEAAHQGVITWNPPQRSFHNFTLCYIKETEKDCLNLDKNLIKYDLQNLKPYTKYVLSLHAYIIAKVQRNGSAAMCHFTTKSAPPSQVWNMTVSMTSDNSMHVKCRPPRDRNGPHERYHLEVEAGNTLVRNESHKNCDFRVKDLQYSTDYTFKAYFHNGDYPGEPFILHHSTSYNSK

SEQ ID NO: 2912 - protein, 1265 aa, synthetic construct
  REGION 1..1265: note = PTPRD (P23468) SP+PP+ECD
MVHVARLLLLLLTFFLRTDAETPPRFTRTPVDQTGVSGGVASFICQATGDPRPKIVWNKKGKKVSNQRFEVIEFDDGSGSVLRIQPLRTPRDEAIYECVASNNVGEISVSTRLTVLREDQIPRGFPTIDMGPQLKVVERTRTATMLCAASGNPDPEITWFKDFLPVDTSNNNGRIKQLRSESIGGTPIRGALQIEQSEESDQGKYECVATNSAGTRYSAPANLYVRELREVRRVPPRFSIPPTNHEIMPGGSVNITCVAVGSPMPYVKWMLGAEDLTPEDDMPIGRNVLELNDVRQSANYTCVAMSTLGVIEAIAQITVKALPKPPGTPVVTESTATSITLTWDSGNPEPVSYYIIQHKPKNSEELYKEIDGVATTRYSVAGLSPYSDYEFRVVAVNNIGRGPPSEPVLTQTSEQAPSSAPRDVQARMLSSTTILVQWKEPEEPNGQIQGYRVYYTMDPTQHVNNWMKHNVADSQITTIGNLVPQKTYSVKVLAFTSIGDGPLSSDIQVITQTGVPGQPLNFKAEPESETSILLSWTPPRSDTIANYELVYKDGEHGEEQRITIEPGTSYRLQGLKPNSLYYFRLAARSPQGLGASTAEISARTMQSKPSAPPQDISCTSPSSTSILVSWQPPPVEKQNGIITEYSIKYTAVDGEDDKPHEILGIPSDTTKYLLEQLEKWTEYRITVTAHTDVGPGPESLSVLIRTNEDVPSGPPRKVEVEAVNSTSVKVSWRSPVPNKQHGQIRGYQVHYVRMENGEPKGQPMLKDVMLADAQWEFDDTTEHDMIISGLQPETSYSLTVTAYTTKGDGARSKPKLVSTTGAVPGKPRLVINHTQMNTALIQWHPPVDTFGPLQGYRLKFGRKDMEPLTTLEFSEKEDHFTATDIHKGASYVFRLSARNKVGFGEEMVKEISIPEEVPTGFPQNLHSEGTTSTSVQLSWQPPVLAERNGIITKYTLLYRDINIPLLPMEQLIVPADTTMTLTGLKPDTTYDVKVRAHTSKGPGPYSPSVQFRTLPVDQVFAKNFHVKAVMKTSVLLSWEIPENYNSAMPFKILYDDGKMVEEVDGRATQKLIVNLKPEKSYSFVLTNRGNSAGGLQHRVTAKTAPDVLRTKPAFIGKTNLDGMITVQLPEVPANENIKGYYIIIVPLKKSRGKFIKPWESPDEMELDELLKEISRKRRSIRYGREVELKPYIAAHFDVLPTEFTLGDDKHYGGFTNKQLQSGQEYVFFVLAVMEHAESKMYATSPYSDPVVSMDLDPQPITDEEE

SEQ ID NO: 2913 - protein, 1263 aa, synthetic construct
  REGION 1..1263: note = PTPRF (P10586) SP+PP+ECD
MAPEPAPGRTMVPLVPALVMLGLVAGAHGDSKPVFIKVPEDQTGLSGGVASFVCQATGEPKPRITWMKKGKKVSSQRFEVIEFDDGAGSVLRIQPLRVQRDEAIYECTATNSLGEINTSAKLSVLEEEQLPPGFPSIDMGPQLKVVEKARTATMLCAAGGNPDPEISWFKDFLPVDPATSNGRIKQLRSGALQIESSEESDQGKYECVATNSAGTRYSAPANLYVRVRRVAPRFSIPPSSQEVMPGGSVNLTCVAVGAPMPYVKWMMGAEELTKEDEMPVGRNVLELSNVVRSANYTCVAISSLGMIEATAQVTVKALPKPPIDLVVTETTATSVTLTWDSGNSEPVTYYGIQYRAAGTEGPFQEVDGVATTRYSIGGLSPFSEYAFRVLAVNSIGRGPPSEAVRARTGEQAPSSPPRRVQARMLSASTMLVQWEPPEEPNGLVRGYRVYYTPDSRRPPNAWHKHNTDAGLLTTVGSLLPGITYSLRVLAFTAVGDGPPSPTIQVKTQQGVPAQPADFQAEVESDTRIQLSWLLPPQERIIMYELVYWAAEDEDQQHKVTFDPTSSYTLEDLKPDTLYRFQLAARSDMGVGVFTPTIEARTAQSTPSAPPQKVMCVSMGSTTVRVSWVPPPADSRNGVITQYSVAYEAVDGEDRGRHVVDGISREHSSWDLVGLEKWTEYRVWVRAHTDVGPGPESSPVLVRTDEDVPSGPPRKVEVEPLNSTAVHVYWKLPVPSKQHGQIRGYQVTYVRLENGEPRGLPIIQDVMLAEAQWRPEESEDYETTISGLTPETTYSVTVAAYTTKGDGARSKPKIVTTTGAVPGRPTMMISTTAMNTALLQWHPPKELPGELLGYRLQYCRADEARPNTIDFGKDDQHFTVTGLHKGTTYIFRLAAKNRAGLGEEFEKEIRTPEDLPSGFPQNLHVTGLTTSTTELAWDPPVLAERNGRIISYTVVFRDINSQQELQNITTDTRFTLTGLKPDTTYDIKVRAWTSKGSGPLSPSIQSRTMPVEQVFAKNFRVAAAMKTSVLLSWEVPDSYKSAVPFKILYNGQSVEVDGHSMRKLIADLQPNTEYSFVLMNRGSSAGGLQHLVSIRTAPDLLPHKPLPASAYIEDGRFDLSMPHVQDPSLVRWFYIVVVPIDRVGGSMLTPRWSTPEELELDELLEAIEQGGEEQRRRRRQAERLKPYVAAQLDVLPETFTLGDKKNYRGFYNRPLSPDLSYQCFVLASLKEPMDQKRYASSPYSDEIVVQVTPAQQQEEPEMLW

SEQ ID NO: 2914 - protein, 736 aa, synthetic construct
  REGION 1..736: note = PTPRG (P23470) SP+PP+ECD
MRRLLEPCWWILFLKITSSVLHYVVCFPALTEGYVGALHENRHGSAVQIRRRKASGDPYWAYSGAYGPEHWVTSSVSCGGRHQSPIDILDQYARVGEEYQELQLDGFDNESSNKTWMKNTGKTVAILLKDDYFVSGAGLPGRFKAEKVEFHWGHSNGSAGSEHSINGRRFPVEMQIFFYNPDDFDSFQTAISENRIIGAMAIFFQVSPRDNSALDPIIHGLKGVVHHEKETFLDPFVLRDLLPASLGSYYRYTGSLTTPPCSEIVEWIVFRRPVPISYHQLEAFYSIFTTEQQDHVKSVEYLRNNFRPQQRLHDRVVSKSAVRDSWNHDMTDFLENPLGTEASKVCSSPPIHMKVQPLNQTALQVSWSQPETIYHPPIMNYMISYSWTKNEDEKEKTFTKDSDKDLKATISHVSPDSLYLFRVQAVCRNDMRSDFSQTMLFQANTTRIFQGTRIVKTGVPTASPASSADMAPISSGSSTWTSSGIPFSFVSMATGMGPSSSGSQATVASVVTSTLLAGLGFGGGGISSFPSTVWPTRLPTAASASKQAARPVLATTEALASPGPDGDSSPTKDGEGTEEGEKDEKSESEDGEREHEEDGEKDSEKKEKSGVTHAAEERNQTEPSPTPSSPNRTAEGGHQTIPGHEQDHTAVPTDQTGGRRDAGPGLDPDMVTSTQVPPTATEEQYAGSDPKRPEMPSKKPMSRGDRFSEDSRFITVNPAEKNTSGMISRPAPGRME

SEQ ID NO: 2915 - protein, 754 aa, synthetic construct
  REGION 1..754: note = PTPRH (Q9HD43) SP+PP+ECD
MAGAGGGLGVWGNLVLLGLCSWTGARAPAPNPGRNLTVETQTTSSISLSWEVPDGLDSQNSNYWVQCTGDGGTTETRNTTATNVTVDGLGPGSLYTCSVWVEKDGVNSSVGTVTTATAPNPVRNLRVEAQTNSSIALTWEVPDGPDPQNSTYGVEYTGDGGRAGTRSTAHTNITVDGLEPGCLYAFSMWVGKNGINSSRETRNATTAHNPVRNLRVEAQTTSSISLSWEVPDGTDPQNSTYCVQCTGDGGRTETRNTTDTRVTVDGLGPGSLYTCSVWVEKDGVNSSVEIVTSATAPNPVRNLTVEAQTNSSIALTWEVPDGPDPQNSTYGVEYTGDGGRAGTRSTAHTNITVDRLEPGCLYVFSVWVGKNGINSSRETRNATTAPNPVRNLHMETQTNSSIALCWEVPDGPYPQDYTYWVEYTGDGGGTETRNTTNTSVTAERLEPGTLYTFSVWAEKNGARGSRQNVSISTVPNAVTSLSKQDWTNSTIALRWTAPQGPGQSSYSYWVSWVREGMTDPRTQSTSGTDITLKELEAGSLYHLTVWAERNEVRGYNSTLTAATAPNEVTDLQNETQTKNSVMLWWKAPGDPHSQLYVYWVQWASKGHPRRGQDPQANWVNQTSRTNETWYKVEALEPGTLYNFTVWAERNDVASSTQSLCASTYPDTVTITSCVSTSAGYGVNLIWSCPQGGYEAFELEVGGQRGSQDRSSCGEAVSVLGLGPARSYPATITTIWDGMKVVSHSVVCHTESAGV

SEQ ID NO: 2916 - protein, 975 aa, synthetic construct
  REGION 1..975: note = PTPRJ (Q12913) SP+PP+ECD
MKPAAREARLPPRSPGLRWALPLLLLLLRLGQILCAGGTPSPIPDPSVATVATGENGITQISSTAESFHKQNGTGTPQVETNTSEDGESSGANDSLRTPEQGSNGTDGASQKTPSSTGPSPVFDIKAVSISPTNVILTWKSNDTAASEYKYVVKHKMENEKTITVVHQPWCNITGLRPATSYVFSITPGIGNETWGDPRVIKVITEPIPVSDLRVALTGVRKAALSWSNGNGTASCRVLLESIGSHEELTQDSRLQVNISGLKPGVQYNINPYLLQSNKTKGDPLGTEGGLDASNTERSRAGSPTAPVHDESLVGPVDPSSGQQSRDTEVLLVGLEPGTRYNATVYSQAANGTEGQPQAIEFRTNAIQVFDVTAVNISATSLTLIWKVSDNESSSNYTYKIHVAGETDSSNLNVSEPRAVIPGLRSSTFYNITVCPVLGDIEGTPGFLQVHTPPVPVSDFRVTVVSTTEIGLAWSSHDAESFQMHITQEGAGNSRVEITTNQSIIIGGLFPGTKYCFEIVPKGPNGTEGASRTVCNRTVPSAVFDIHVVYVTTTEMWLDWKSPDGASEYVYHLVIESKHGSNHTSTYDKAITLQGLIPGTLYNITISPEVDHVWGDPNSTAQYTRPSNVSNIDVSTNTTAATLSWQNFDDASPTYSYCLLIEKAGNSSNATQVVTDIGITDATVTELIPGSSYTVEIFAQVGDGIKSLEPGRKSFCTDPASMASFDCEVVPKEPALVLKWTCPPGANAGFELEVSSGAWNNATHLESCSSENGTEYRTEVTYLNFSTSYNISITTVSCGKMAAPTRNTCTTGITDPPPPDGSPNITSVSHNSVKVKFSGFEASHGPIKAYAVILTTGEAGHPSADVLKYTYEDFKKGASDTYVTYLIRTEEKGRSQSLSEVLKYEIDVGNESTTLGYYNGKLEPLGSYRACVAGFTNITFHPQNKGLIDGAESYVSFSRYSDAVSLPQDPGVICG

SEQ ID NO: 2917 - protein, 752 aa, synthetic construct
  REGION 1..752: note = PTPRK (Q15262) SP+PP+ECD
MDTTAAAALPAFVALLLLSPWPLLGSAQGQFSAGGCTFDDGPGACDYHQDLYDDFEWVHVSAQEPHYLPPEMPQGSYMIVDSSDHDPGEKARLQLPTMKENDTHCIDFSYLLYSQKGLNPGTLNILVRVNKGPLANPIWNVTGFTGRDWLRAELAVSTFWPNEYQVIFEAEVSGGRSGYIAIDDIQVLSYPCDKSPHFLRLGDVEVNAGQNATFQCIATGRDAVHNKLWLQRRNGEDIPVAQTKNINHRRFAASFRLQEVTKTDQDLYRCVTQSERGSGVSNFAQLIVREPPRPIAPPQLLGVGPTYLLIQLNANSIIGDGPIILKEVEYRMTSGSWTETHAVNAPTYKLWHLDPDTEYEIRVLLTRPGEGGTGLPGPPLITRTKCAEPMRTPKTLKIAEIQARRIAVDWESLGYNITRCHTFNVTICYHYFRGHNESKADCLDMDPKAPQHVVNHLPPYTNVSLKMILTNPEGRKESEETIIQTDEDVPGPVPVKSLQGTSFENKIFLNWKEPLDPNGIITQYEISYSSIRSFDPAVPVAGPPQTVSNLWNSTHHVFMHLHPGTTYQFFIRASTVKGFGPATAINVTTNISAPTLPDYEGVDASLNETATTITVLLRPAQAKGAPISAYQIVVEELHPHRTKREAGAMECYQVPVTYQNAMSGGAPYYFAAELPPGNLPEPAPFTVGDNRTYQGFWNPPLAPRKGYNIYFQAMSSVEKETKTQCVRIATKAATEEPEVIPDPAKQTDRVVK

SEQ ID NO: 2918 - protein, 742 aa, synthetic construct
  REGION 1..742: note = PTPRM (P28827) SP+PP+ECD
MRGLGTCLATLAGLLLTAAGETFSGGCLFDEPYSTCGYSQSEGDDFNWEQVNTLTKPTSDPWMPSGSFMLVNASGRPEGQRAHLLLPQLKENDTHCIDFHYFVSSKSNSPPGLLNVYVKVNNGPLGNPIWNISGDPTRTWNRAELAISTFWPNFYQVIFEVITSGHQGYLAIDEVKVLGHPCTRTPHFLRIQNVEVNAGQFATFQCSAIGRTVAGDRLWLQGIDVRDAPLKEIKVTSSRRFIASFNVVNTTKRDAGKYRCMIRTEGGVGISNYAELVVKEPPVPIAPPQLASVGATYLWIQLNANSINGDGPIVAREVEYCTASGSWNDRQPVDSTSYKIGHLDPDTEYEISVLLTRPGEGGTGSPGPALRTRTKCADPMRGPRKLEVVEVKSRQITIRWEPFGYNVTRCHSYNLTVHYCYQVGGQEQVREEVSWDTENSHPQHTITNLSPYTNVSVKLILMNPEGRKESQELIVQTDEDLPGAVPTESIQGSTFEEKIFLQWREPTQTYGVITLYEITYKAVSSFDPEIDLSNQSGRVSKLGNETHFLFFGLYPGTTYSFTIRASTAKGFGPPATNQFTTKISAPSMPAYELETPLNQTDNTVTVMLKPAHSRGAPVSVYQIVVEEERPRRTKKTTEILKCYPVPIHFQNASLLNSQYYFAAEFPADSLQAAQPFTIGDNKTYNGYWNTPLLPYKSYRIYFQAASRANGETKIDCVQVATKGAATPKPVPEPEKQTDHTVK

SEQ ID NO: 2919 - protein, 575 aa, synthetic construct
  REGION 1..575: note = PTPRN (Q16849) SP+PP+ECD
MRRPRRPGGLGGSGGLRLLLCLLLLSSRPGGCSAVSAHGCLFDRRLCSHLEVCIQDGLFGQCQVGVGQARPLLQVTSPVLQRLQGVLRQLMSQGLSWHDDLTQYVISQEMERIPRLRPPEPRPRDRSGLAPKRPGPAGELLLQDIPTGSAPAAQHRLPQPPVGKGGAGASSSLSPLQAELLPPLLEHLLLPPQPPHPSLSYEPALLQPYLFHQFGSRDGSRVSEGSPGMVSVGPLPKAEAPALFSRTASKGIFGDHPGHSYGDLPGPSPAQLFQDSGLLYLAQELPAPSRARVPRLPEQGSSSRAEDSPEGYEKEGLGDRGEKPASPAVQPDAALQRLAAVLAGYGVELRQLTPEQLSTLLTLLQLLPKGAGRNPGGVVNVGADIKKTMEGPVEGRDTAELPARTSPMPGHPTASPTSSEVQQVPSPVSSEPPKAARPPVTPVLLEKKSPLGQSQPTVAGQPSARPAAEEYGYIVTDQKPLSLAAGVKLLEILAEHVHMSSGSFINISVVGPALTFRIRHNEQNLSLADVTQQAGLVKSELEAQTGLQILQTGVGQREEAAAVLPQTAHSTSPMR

SEQ ID NO: 2920 - protein, 615 aa, synthetic construct
  REGION 1..615: note = PTPRN2 (Q92932) SP+PP+ECD
MGPPLPLLLLLLLLLPPRVLPAAPSSVPRGRQLPGRLGCLLEEGLCGASEACVNDGVFGRCQKVPAMDFYRYEVSPVALQRLRVALQKLSGTGFTWQDDYTQYVMDQELADLPKTYLRRPEASSPARPSKHSVGSERRYSREGGAALANALRRHLPFLEALSQAPASDVLARTHTAQDRPPAEGDDRFSESILTYVAHTSALTYPPGSRTQLREDLLPRTLGQLQPDELSPKVDSGVDRHHLMAALSAYAAQRPPAPPGEGSLEPQYLLRAPSRMPRPLLAPAAPQKWPSPLGDSEDPSSTGDGARIHTLLKDLQRQPAEVRGLSGLELDGMAELMAGLMQGVDHGVARGSPGRAALGESGEQADGPKATLRGDSFPDDGVQDDDDRLYQEVHRLSATLGGLLQDHGSRLLPGALPFARPLDMERKKSEHPESSLSSEEETAGVENVKSQTYSKDLLGQQPHSEPGAAAFGELQNQMPGPSKEEQSLPAGAQEALSDGLQLEVQPSEEEARGYIVTDRDPLRPEEGRRLVEDVARLLQVPSSAFADVEVLGPAVTFKVSANVQNVTTEDVEKATVDNKDKLEETSGLKILQTGVGSKSKLKFLPPQAEQEDSTKF

SEQ ID NO: 2921 - protein, 822 aa, synthetic construct
  REGION 1..822: note = PTPRO (Q16827) SP+PP+ECD
MGHLPTGIHGARRLLPLLWLFVLFKNATAFHVTVQDDNNIVVSLEASDVISPASVYVVKITGESKNYFFEFEEFNSTLPPPVIFKASYHGLYYIITLVVVNGNVVTKPSRSITVLTKPLPVTSVSIYDYKPSPETGVLFEIHYPEKYNVFTRVNISYWEGKDFRTMLYKDFFKGKTVFNHWLPGMCYSNITFQLVSEATFNKSTLVEYSGVSHEPKQHRTAPYPPQNISVRIVNLNKNNWEEQSGNFPEESFMRSQDTIGKEKLFHFTEETPEIPSGNISSGWPDFNSSDYETTSQPYWWDSASAAPESEDEFVSVLPMEYENNSTLSETEKSTSGSFSFFPVQMILTWLPPKPPTAFDGFHIHIEREENFTEYLMVDEEAHEFVAELKEPGKYKLSVTTFSSSGSCETRKSQSAKSLSFYISPSGEWIEELTEKPQHVSVHVLSSTTALMSWTSSQENYNSTIVSVVSLTCQKQKESQRLEKQYCTQVNSSKPIIENLVPGAQYQVVIYLRKGPLIGPPSDPVTFAIVPTGIKDLMLYPLGPTAVVLSWTRPYLGVFRKYVVEMFYFNPATMTSEWTTYYEIAATVSLTASVRIANLLPAWYYNFRVTMVTWGDPELSCCDSSTISFITAPVAPEITSVEYFNSLLYISWTYGDDTTDLSHSRMLHWMVVAEGKKKIKKSVTRNVMTAILSLPPGDIYNLSVTACTERGSNTSMLRLVKLEPAPPKSLFAVNKTQTSVTLLWVEEGVADFFEVFCQQVGSSQKTKLQEPVAVSSHVVTISSLLPATAYNCSVTSFSHDSPSVPTFIAVSTMVTEMNPNVVV

SEQ ID NO: 2922 - protein, 1947 aa, synthetic construct
  REGION 1..1947: note = PTPRQ (Q9UMZ3) SP+PP+ECD
MKKVPIKPEQPEKLRAFNISTHSFSLHWSLPSGHVERYQVDLVPDSGFVTIRDLGGGEYQVDVSNVVPGTRYDITISSISTTYTSPVTRIVTTNVTKPGPPVFLAGERVGSAGILLSWNTPPNPNGRIISYIVKYKEVCPWMQTVYTQVRSKPDSLEVLLTNLNPGTTYEIKVAAENSAGIGVFSDPFLFQTAESAPGKVVNLTVEAYNASAVKLIWYLPRQPNGKITSFKISVKHARSGIVVKDVSIRVEDILTGKLPECNENSESFLWSTASPSPTLGRVTPPSRTTHSSSTLTQNEISSVWKEPISFVVTHLRPYTTYLFEVSAVTTEAGYIDSTIVRTPESVPEGPPQNCVTGNITGKSFSILWDPPTIVTGKFSYRVELYGPSGRILDNSTKDLKFAFTNLTPFTMYDVYIAAETSAGTGPKSNISVFTPPDVPGAVFDLQLAEVESTQVRITWKKPRQPNGIINQYRVKVLVPETGIILENTLLTGNNEYINDPMAPEIVNIVEPMVGLYEGSAEMSSDLHSLATFIYNSHPDKNFPARNRAEDQTSPVVTTRNQYITDIAAEQLSYVIRRLVPFTEHMISVSAFTIMGEGPPTVLSVRTRQQVPSSIKIINYKNISSSSILLYWDPPEYPNGKITHYTIYAMELDTNRAFQITTIDNSFLITGLKKYTKYKMRVAASTHVGESSLSEENDIFVRTSEDEPESSPQDVEVIDVTADEIRLKWSPPEKPNGIIIAYEVLYKNIDTLYMKNTSTTDIILRNLRPHTLYNISVRSYTRFGHGNQVSSLLSVRTSETVPDSAPENITYKNISSGEIELSFLPPSSPNGIIKKYTIYLKRSNGNEERTINTTSLTQNIKVLKKYTQYIIEVSASTLKGEGVRSAPISILTEEDAPDSPPQDFSVKQLSGVTVKLSWQPPLEPNGIILYYTVYVWNRSSLKTINVTETSLELSDLDYNVEYSAYVTASTRFGDGKTRSNIISFQTPEGAPSDPPKDVYYANLSSSSIILFWTPPSKPNGIIQYYSVYYRNTSGTFMQNFTLHEVTNDFDNMTVSTIIDKLTIFSYYTFWLTASTSVGNGNKSSDIIEVYTDQDIPEGFVGNLTYESISSTAINVSWVPPAQPNGLVFYYVSLILQQTPRHVRPPLVTYERSIYFDNLEKYTDYILKITPSTEKGFSDTYTAQLYIKTEEDVPETSPIINTFKNLSSTSVLLSWDPPVKPNGAIISYDLTLQGPNENYSFITSDNYIILEELSPFTLYSFFAAARTRKGLGPSSILFFYTDESVPLAPPQNLTLINCTSDFVWLKWSPSPLPGGIVKVYSFKIHEHETDTIYYKNISGFKTEAKLVGLEPVSTYSIRVSAFTKVGNGNQFSNVVKFTTQESVPDVVQNMQCMATSWQSVLVKWDPPKKANGIITQYMVTVERNSTKVSPQDHMYTFIKLLANTSYVFKVRASTSAGEGDESTCHVSTLPETVPSVPTNIAFSDVQSTSATLTWIRPDTILGYFQNYKITTQLRAQKCKEWESEECVEYQKIQYLYEAHLTEETVYGLKKFRWYRFQVAASTNAGYGNASNWISTKTLPGPPDGPPENVHVVATSPFSISISWSEPAVITGPTCYLIDVKSVDNDEFNISFIKSNEENKTIEIKDLEIFTRYSVVITAFTGNISAAYVEGKSSAEMIVTTLESAPKDPPNNMTFQKIPDEVTKFQLTFLPPSQPNGNIQVYQALVYREDDPTAVQIHNLSIIQKTNTFVIAMLEGLKGGHTYNISVYAVNSAGAGPKVPMRITMDIKAPARPKTKPTPIYDATGKLLVTSTTITIRMPICYYSDDHGPIKNVQVLVTETGAQHDGNVTKWYDAYFNKARPYFTNEGFPNPPCTEGKTKFSGNEEIYIIGADNACMIPGNEDKICNGPLKPKKQYLFKFRATNIMGQFTDSDYSDPVKTLGEGLSERTVE

SEQ ID NO: 2923 - protein, 227 aa, synthetic construct
  REGION 1..227: note = PTPRR (Q15256) SP+PP+ECD
MRRAVCFPALCLLLNLHAAGCFSGNNDHFLAINQKKSGKPVFIYKHSQDIEKSLDIAPQKIYRHSYHSSSEAQVSKRHQIVNSAFPRPAYDPSLNLLAMDGQDLEVENLPIPAANVIVVTLQMDVNKLNITLLRIFRQGVAAALGLLPQQVHINRLIGKKNSIELFVSPINRKTGISDALPSEEVLRSLNINVLHQSLSQFGITEVSPEKNVLQGQHEADKIWSKEG

SEQ ID NO: 2924 - protein, 1282 aa, synthetic construct
  REGION 1..1282: note = PTPRS (Q13332) SP+PP+ECD
MAPTWGPGMVSVVGPMGLLVVLLVGGCAAEEPPRFIKEPKDQIGVSGGVASFVCQATGDPKPRVTWNKKGKKVNSQRFETIEFDESAGAVLRIQPLRTPRDENVYECVAQNSVGEITVHAKLTVLREDQLPSGFPNIDMGPQLKVVERTRTATMLCAASGNPDPEITWFKDFLPVDPSASNGRIKQLRSETFESTPIRGALQIESSEETDQGKYECVATNSAGVRYSSPANLYVRELREVRRVAPRFSILPMSHEIMPGGNVNITCVAVGSPMPYVKWMQGAEDLTPEDDMPVGRNVLELTDVKDSANYTCVAMSSLGVIEAVAQITVKSLPKAPGTPMVTENTATSITITWDSGNPDPVSYYVIEYKSKSQDGPYQIKEDITTTRYSIGGLSPNSEYEIWVSAVNSIGQGPPSESVVTRTGEQAPASAPRNVQARMLSATTMIVQWEEPVEPNGLIRGYRVYYTMEPEHPVGNWQKHNVDDSLLTTVGSLLEDETYTVRVLAFTSVGDGPLSDPIQVKTQQGVPGQPMNLRAEARSETSITLSWSPPRQESIIKYELLFREGDHGREVGRTFDPTTSYVVEDLKPNTEYAFRLAARSPQGLGAFTPVVRQRTLQSKPSAPPQDVKCVSVRSTAILVSWRPPPPETHNGALVGYSVRYRPLGSEDPEPKEVNGIPPTTTQILLEALEKWTQYRITTVAHTEVGPGPESSPVVVRTDEDVPSAPPRKVEAEALNATAIRVLWRSPAPGRQHGQIRGYQVHYVRMEGAEARGPPRIKDVMLADAQWETDDTAEYEMVITNLQPETAYSITVAAYTMKGDGARSKPKVVVTKGAVLGRPTLSVQQTPEGSLLARWEPPAGTAEDQVLGYRLQFGREDSTPLATLEFPPSEDRYTASGVHKGATYVFRLAARSRGGLGEEAAEVLSIPEDTPRGHPQILEAAGNASAGTVLLRWLPPVPAERNGAIVKYTVAVREAGALGPARETELPAAAEPGAENALTLQGLKPDTAYDLQVRAHTRRGPGPFSPPVRYRTFLRDQVSPKNFKVKMIMKTSVLLSWEFPDNYNSPTPYKIQYNGLTLDVDGRTTKKLITHLKPHTFYNFVLTNRGSSLGGLQQTVTAWTAFNLLNGKPSVAPKPDADGFIMVYLPDGQSPVPVQSYFIVMVPLRKSRGGQFLTPLGSPEDMDLEELIQDISRLQRRSLRHSRQLEVPRPYIAARFSVLPPTFHPGDQKQYGGFDNRGLEPGHRYVLFVLAVLQKSEPTFAASPFSDPFQLDNPDPQPIVDGEEG

SEQ ID NO: 2925 - protein, 747 aa, synthetic construct
  REGION 1..747: note = PTPRT (O14522) SP+PP+ECD
MASLAALALSLLLRLQLPPLPGARAQSAAGGCSFDEHYSNCGYSVALGTNGFTWEQINTWEKPMLDQAVPTGSFMMVNSSGRASGQKAHLLLPTLKENDTHCIDFHYYFSSRDRSSPGALNVYVKVNGGPQGNPVWNVSGVVTEGWVKAELAISTFWPHFYQVIFESVSLKGHPGYIAVDEVRVLAHPCRKAPHFLRLQNVEVNVGQNATFQCIAGGKWSQHDKLWLQQWNGRDTALMVTRVVNHRRFSATVSVADTAQRSVSKYRCVIRSDGGSGVSNYAELIVKEPPTPIAPPELLAVGATYLWIKPNANSIIGDGPIILKEVEYRTTTGTWAETHIVDSPNYKLWHLDPDVEYEIRVLLTRPGEGGTGPPGPPLTTRTKCADPVHGPQNVEIVDIRARQLTLQWEPFGYAVTRCHSYNLTVQYQYVFNQQQYEAEEVIQTSSHYTLRGLRPFMTIRLRLLLSNPEGRMESEELVVQTEEDVPGAVPLESIQGGPFEEKIYIQWKPPNETNGVITLYEINYKAVGSLDPSADLSSQRGKVFKLRNETHHLFVGLYPGTTYSFTIKASTAKGFGPPVTTRIATKISAPSMPEYDTDTPLNETDTTITVMLKPAQSRGAPVSVYQLVVKEERLQKSRRAADIIECFSVPVSYRNASSLDSLHYFAAELKPANLPVTQPFTVGDNKTYNGYWNPPLSPLKSYSIYFQALSKANGETKINCVRLATKGASTQNSNTVEPEKQVDNTVKM

SEQ ID NO: 2926 - protein, 749 aa, synthetic construct
  REGION 1..749: note = PTPRU (Q92729) SP+PP+ECD
MARAQALVLALTFQLCAPETETPAAGCTFEEASDPAVPCEYSQAQYDDFQWEQVRIHPGTRAPADLPHGSYLMVNTSQHAPGQRAHVIFQSLSENDTHCVQFSYFLYSRDGHSPGTLGVYVRVNGGPLGSAVWNMTGSHGRQWHQAELAVSTFWPNEYQVLFEALISPDRRGYMGLDDILLLSYPCAKAPHFSRLGDVEVNAGQNASFQCMAAGRAAEAERFLLQRQSGALVPAAGVRHISHRRFLATFPLAAVSRAEQDLYRCVSQAPRGAGVSNFAELIVKEPPTPIAPPQLLRAGPTYLIIQLNTNSIIGDGPIVRKEIEYRMARGPWAEVHAVSLQTYKLWHLDPDTEYEISVLLTRPGDGGTGRPGPPLISRTKCAEPMRAPKGLAFAEIQARQLTLQWEPLGYNVTRCHTYTVSLCYHYTLGSSHNQTIRECVKTEQGVSRYTIKNLLPYRNVHVRLVLTNPEGRKEGKEVTFQTDEDVPSGIAAESLTFTPLEDMIFLKWEEPQEPNGLITQYEISYQSIESSDPAVNVPGPRRTISKLRNETYHVFSNLHPGTTYLFSVRARTGKGFGQAALTEITTNISAPSFDYADMPSPLGESENTITVLLRPAQGRGAPISVYQVIVEEERARRLRREPGGQDCFPVPLTFEAALARGLVHYFGAELAASSLPEAMPFTVGDNQTYRGFWNPPLEPRKAYLIYFQAASHLKGETRLNCIRIARKAACKESKRPLEVSQRSEEMGLIL

SEQ ID NO: 2927 - protein, 1636 aa, synthetic construct
  REGION 1..1636: note = PTPRZ1 (P23471) SP+PP+ECD
MRILKRFLACIQLLCVCRLDWANGYYRQQRKLVEEIGWSYTGALNQKNWGKKYPTCNSPKQSPINIDEDLTQVNVNLKKLKFQGWDKTSLENTFIHNTGKTVEINLTNDYRVSGGVSEMVFKASKITFHWGKCNMSSDGSEHSLEGQKFPLEMQIYCFDADRFSSFEEAVKGKGKLRALSILFEVGTEENLDFKAIIDGVESVSRFGKQAALDPFILLNLLPNSTDKYYIYNGSLTSPPCTDTVDWIVFKDTVSISESQLAVFCEVLTMQQSGYVMLMDYLQNNFREQQYKFSRQVFSSYTGKEEIHEAVCSSEPENVQADPENYTSLLVTWERPRVVYDTMIEKFAVLYQQLDGEDQTKHEFLTDGYQDLGAILNNLLPNMSYVLQIVAICTNGLYGKYSDQLIVDMPTDNPELDLFPELIGTEEIIKEEEEGKDIEEGAIVNPGRDSATNQIRKKEPQISTTTHYNRIGTKYNEAKTNRSPTRGSEFSGKGDVPNTSLNSTSQPVTKLATEKDISLTSQTVTELPPHTVEGTSASLNDGSKTVLRSPHMNLSGTAESLNTVSITEYEEESLLTSFKLDTGAEDSSGSSPATSAIPFISENISQGYIFSSENPETITYDVLIPESARNASEDSTSSGSEESLKDPSMEGNVWFPSSTDITAQPDVGSGRESFLQTNYTEIRVDESEKTTKSFSAGPVMSQGPSVTDLEMPHYSTFAYFPTEVTPHAFTPSSRQQDLVSTVNVVYSQTTQPVYNGETPLQPSYSSEVFPLVTPLLLDNQILNTTPAASSSDSALHATPVFPSVDVSFESILSSYDGAPLLPFSSASFSSELFRHLHTVSQILPQVTSATESDKVPLHASLPVAGGDLLLEPSLAQYSDVLSTTHAASETLEFGSESGVLYKTLMFSQVEPPSSDAMMHARSSGPEPSYALSDNEGSQHIFTVSYSSAIPVHDSVGVTYQGSLFSGPSHIPIPKSSLITPTASLLQPTHALSGDGEWSGASSDSEFLLPDTDGLTALNISSPVSVAEFTYTTSVFGDDNKALSKSEIIYGNETELQIPSFNEMVYPSESTVMPNMYDNVNKLNASLQETSVSISSTKGMFPGSLAHTTTKVFDHEISQVPENNFSVQPTHTVSQASGDTSLKPVLSANSEPASSDPASSEMLSPSTQLLFYETSASFSTEVLLQPSFQASDVDTLLKTVLPAVPSDPILVETPKVDKISSTMLHLIVSNSASSENMLHSTSVPVFDVSPTSHMHSASLQGLTISYASEKYEPVLLKSESSHQVVPSLYSNDELFQTANLEINQAHPPKGRHVFATPVLSIDEPLNTLINKLIHSDEILTSTKSSVTGKVFAGIPTVASDTFVSTDHSVPIGNGHVAITAVSPHRDGSVTSTKLLFPSKATSELSHSAKSDAGLVGGGEDGDTDDDGDDDDDDRGSDGLSIHKCMSCSSYRESQEKVMNDSDTHENSLMDQNNPISYSLSENSEEDNRVTSVSSDSQTGMDRSPGKSPSANGLSQKHNDGKEENDIQTGSALLPLSPESKAWAVLTSDEESGSGQGTSDSLNENETSTDFSFADTNEKDADGILAAGDSEITPGFPQSPTSSVTSENSEVFHVSEAEASNSSHESRIGLAEGLESEKK

SEQ ID NO: 2928 - protein, 96 aa, synthetic construct
  REGION 1..96: note = PTTG1IP (P53801) SP+PP+ECD
MAPGVARGPTPYWRLRLGGAALLLLLIPVAAAQEPPGAACSQNTNKTCEECLKNVSCLWCNTNKACLDYPVTSVLPPASLCKLSSARWGVCWVNFE

SEQ ID NO: 2929 - protein, 343 aa, synthetic construct
  REGION 1..343: note = PVR (P15151) SP+PP+ECD
MARAMAAAWPLLLVALLVLSWPPPGTGDVVVQAPTQVPGFLGDSVTLPCYLQVPNMEVTHVSQLTWARHGESGSMAVFHQTQGPSYSESKRLEFVAARLGAELRNASLRMFGLRVEDEGNYTCLFVTFPQGSRSVDIWLRVLAKPQNTAEVQKVQLTGEPVPMARCVSTGGRPPAQITWHSDLGGMPNTSQVPGFLSGTVTVTSLWILVPSSQVDGKNVTCKVEHESFEKPQLLTVNLTVYYPPEVSISGYDNNWYLGQNEATLTCDARSNPEPTGYNWSTTMGPLPPFAVAQGAQLLIRPVDKPINTTLICNVTNALGARQAELTVQVKEGPPSEHSGISRN

SEQ ID NO: 2930 - protein, 355 aa, synthetic construct
  REGION 1..355: note = PVRL1 (Q15223) SP+PP+ECD
MARMGLAGAAGRWWGLALGLTAFFLPGVHSQVVQVNDSMYGFIGTDVVLHCSFANPLPSVKITQVTWQKSTNGSKQNVAIYNPSMGVSVLAPYRERVEFLRPSFTDGTIRLSRLELEDEGVYICEFATFPTGNRESQLNLTVMAKPTNWIEGTQAVLRAKKGQDDKVLVATCTSANGKPPSVVSWETRLKGEAEYQEIRNPNGTVTVISRYRLVPSREAHQQSLACIVNYHMDRFKESLTLNVQYEPEVTIEGFDGNWYLQRMDVKLTCKADANPPATEYHWTTLNGSLPKGVEAQNRTLFFKGPINYSLAGTYICEATNPIGTRSGQVEVNITEFPYTPSPPEHGRRAGPVPTA

SEQ ID NO: 2931 - protein, 360 aa, synthetic construct
  REGION 1..360: note = PVRL2 (Q92692) SP+PP+ECD
MARAAALLPSRSPPTPLLWPLLLLLLLETGAQDVRVQVLPEVRGQLGGTVELPCHLLPPVPGLYISLVTWQRPDAPANHQNVAAFHPKMGPSFPSPKPGSERLSFVSAKQSTGQDTEAELQDATLALHGLTVEDEGNYTCEFATFPKGSVRGMTWLRVIAKPKNQAEAQKVTFSQDPTTVALCISKEGRPPARISWLSSLDWEAKETQVSGTLAGTVTVTSRFTLVPSGRADGVTVTCKVEHESFEEPALIPVTLSVRYPPEVSISGYDDNWYLGRTDATLSCDVRSNPEPTGYDWSTTSGTFPTSAVAQGSQLVIHAVDSLFNTTFVCTVTNAVGMGRAEQVIFVRETPNTAGAGATGG

SEQ ID NO: 2932 - protein, 404 aa, synthetic construct
  REGION 1..404: note = PVRL3 (Q9NQS3) SP+PP+ECD
MARTLRPSPLCPGGGKAQLSSASLLGAGLLLQPPTPPPLLLLLFPLLLFSRLCGALAGPIIVEPHVTAVWGKNVSLKCLIEVNETITQISWEKIHGKSSQTVAVHHPQYGFSVQGEYQGRVLFKNYSLNDATITLHNIGFSDSGKYICKAVTFPLGNAQSSTTVTVLVEPTVSLIKGPDSLIDGGNETVAAICIAATGKPVAHIDWEGDLGEMESTTTSFPNETATIISQYKLFPTRFARGRRITCVVKHPALEKDIRYSFILDIQYAPEVSVTGYDGNWFVGRKGVNLKCNADANPPPFKSVWSRLDGQWPDGLLASDNTLHFVHPLTFNYSGVYICKVTNSLGQRSDQKVIYISDPPTTTTLQPTIQWHPSTADIEDLATEPKKLPFPLSTLATIKDDTIAT

SEQ ID NO: 2933 - protein, 349 aa, synthetic construct
  REGION 1..349: note = PVRL4 (Q96NY8) SP+PP+ECD
MPLSLGAEMWGPEAWLLLLLLLASFTGRCPAGELETSDVVTVVLGQDAKLPCFYRGDSGEQVGQVAWARVDAGEGAQELALLHSKYGLHVSPAYEGRVEQPPPPRNPLDGSVLLRNAVQADEGEYECRVSTFPAGSFQARLRLRVLVPPLPSLNPGPALEEGQGLTLAASCTAEGSPAPSVTWDTEVKGTTSSRSFKHSRSAAVTSEFHLVPSRSMNGQPLTCVVSHPGLLQDQRITHILHVSFLAEASVRGLEDQNLWHIGREGAMLKCLSEGQPPPSYNWTRLDGPLPSGVRVDGDTLGFPPLTTEHSGIYVCHVSNEFSSRDSQVTVDVLDPQEDSGKQVDLVSAS

SEQ ID NO: 2934 - protein, 709 aa, synthetic construct
  REGION 1..709: note = QSOX1 (O00391) SP+PP+ECD
MRRCNSGSGPPPSLLLLLLWLLAVPGANAAPRSALYSPSDPLTLLQADTVRGAVLGSRSAWAVEFFASWCGHCIAFAPTWKALAEDVKAWRPALYLAALDCAEETNSAVCRDFNIPGFPTVRFFKAFTKNGSGAVFPVAGADVQTLRERLIDALESHHDTWPPACPPLEPAKLEEIDGFFARNNEEYLALIFEKGGSYLGREVALDLSQHKGVAVRRVLNTEANVVRKFGVTDFPSCYLLFRNGSVSRVPVLMESRSFYTAYLQRLSGLTREAAQTTVAPTTANKIAPTVWKLADRSKIYMADLESALHYILRIEVGRFPVLEGQRLVALKKFVAVLAKYFPGRPLVQNFLHSVNEWLKRQKRNKIPYSFFKTALDDRKEGAVLAKKVNWIGCQGSEPHFRGFPCSLWVLFHFLTVQAARQNVDHSQEAAKAKEVLPAIRGYVHYFFGCRDCASHFEQMAAASMHRVGSPNAAVLWLWSSHNRVNARLAGAPSEDPQFPKVQWPPRELCSACHNERLDVPVWDVEATLNFLKAHFSPSNIILDFPAAGSAARRDVQNVAAAPELAMGALELESRNSTLDPGKPEMMKSPTNTTPHVPAEGPEASRPPKLHPGLRAAPGQEPPEHMAELQRNEQEQPLGQWHLSKRDTGAALLAESRAEKNRLWGPLEVRRVGRSSKQLVDIPEGQLEARAGRGRGQWLQVLGGGFSYLD

SEQ ID NO: 2935 - protein, 661 aa, synthetic construct
  REGION 1..661: note = QSOX2 (Q6ZRP7) SP+PP+ECD
MAAAGAAVARSPGIGAGPALRARRSPPPRAARLPRLLVLLAAAAVGPGAGGAARLYRAGEDAVWVLDSGSVRGATANSSAAWLVQFYSSWCGHCIGYAPTWRALAGDVRDWASAIRVAALDCMEEKNQAVCHDYDIHFYPTFRYFKAFTKEFTTGENFKGPDRELRTVRQTMIDFLQNHTEGSRPPACPRLDPIQPSDVLSLLDNRGSHYVAIVFESNSSYLGREVILDLIPYESIVVTRALDGDKAFLEKLGVSSVPSCYLIYPNGSHGLINVVKPLRAFFSSYLKSLPDVRKKSLPLPEKPHKEENSEIVVWREFDKSKLYTVDLESGLHYLLRVELAAHKSLAGAELKTLKDFVTVLAKLFPGRPPVKKLLEMLQEWLASLPLDRIPYNAVLDLVNNKMRISGIFLTNHIKWVGCQGSRSELRGYPCSLWKLFHTLTVEASTHPDALVGTGFEDDPQAVLQTMRRYVHTFFGCKECGEHFEEMAKESMDSVKTPDQAILWLWKKHNMVNGRLAGHLSEDPRFPKLQWPTPDLCPACHEEIKGLASWDEGHVLTFLKQHYGRDNLLDTYSADQGDSSEGGTLARGEEEEKRLTPPEVSHGDRDTQSVRPPGALGPRPALPESLHHSLDGKLQSLDGPGAHKEVGGAAPFLGVDFSSLDM

SEQ ID NO: 2936 - protein, 225 aa, synthetic construct
  REGION 1..225: note = RAET1E (Q8TD07) SP+PP+ECD
MRRISLTSSPVRLLLFLLLLLIALEIMVGGHSLCFNFTIKSLSRPGQPWCEAQVFLNKNLFLQYNSDNNMVKPLGLLGKKVYATSTWGELTQTLGEVGRDLRMLLCDIKPQIKTSDPSTLQVEMFCQREAERCTGASWQFATNGEKSLLFDAMNMTWTVINHEASKIKETWKKDRGLEKYFRKLSKGDCDHWLREFLGHWEAMPEPTVSPVNASDIHWSSSSLPD

SEQ ID NO: 2937 - protein, 223 aa, synthetic construct
  REGION 1..223: note = RAET1G (Q6H3X3) SP+PP+ECD
MAAAASPAFLLRLPLLLLLSSWCRTGLADPHSLCYDITVIPKFRPGPRWCAVQGQVDEKTFLHYDCGSKTVTPVSPLGKKLNVTTAWKAQNPVLREVVDILTEQLLDIQLENYIPKEPLTLQARMSCEQKAEGHGSGSWQLSFDGQIFLLFDSENRMWTTVHPGARKMKEKWENDKDMTMSFHYISMGDCTGWLEDFLMGMDSTLEPSAGAPPTMSSGTAQPR

SEQ ID NO: 2938 - protein, 145 aa, synthetic construct
  REGION 1..145: note = RAMP2 (O60895) SP+PP+ECD
MASLRVERAGGPRLPRTRVGRPAALRLLLLLGAVLNPHEALAQPLPTTGTPGSEGGTVKNYETAVQFCWNHYKDQMDPIEKDWCDWAMISRPYSTLRDCLEHFAELFDLGFPNPLAERIIFETHQIHFANCSLVQPTFSDPPEDV

SEQ ID NO: 2939 - protein, 118 aa, synthetic construct
  REGION 1..118: note = RAMP3 (O60896) SP+PP+ECD
METGALRRPQLLPLLLLLCGGCPRAGGCNETGMLERLPLCGKAFADMMGKVDVWKWCNLSEFIVYYESFTNCTEMEANVVGCYWPNPLAQGFITGIHRQFFSNCTVDRVHLEDPPDEV

SEQ ID NO: 2940 - protein, 57 aa, synthetic construct
  REGION 1..57: note = RELL1 (Q8IUW5) SP+PP+ECD
MAPRALPGSAVLAAAVFVGGAVSSPLVAPDNGSSRTLHSRTETTPSPSNDTGNGHPE

SEQ ID NO: 2941 - protein, 162 aa, synthetic construct
  REGION 1..162: note = RELT (Q969Z4) SP+PP+ECD
MKPSLLCRPLSCFLMLLPWPLATLTSTTLWQCPPGEEPDLDPGQGTLCRPCPPGTFSAAWGSSPCQPHARCSLWRRLEAQVGMATRDTLCGDCWPGWFGPWGVPRVPCQPCSWAPLGTHGCDEWGRRARRGVEVAAGASSGGETRQPGNGTRAGGPEETAAQ

SEQ ID NO: 2942 - protein, 635 aa, synthetic construct
  REGION 1..635: note = RET (P07949) SP+PP+ECD
MAKATSGAAGLRLLLLLLLPLLGKVALGLYFSRDAYWEKLYVDQAAGTPLLYVHALRDAPEEVPSFRLGQHLYGTYRTRLHENNWICIQEDTGLLYLNRSLDHSSWEKLSVRNRGFPLLTVYLKVFLSPTSLREGECQWPGCARVYFSFFNTSFPACSSLKPRELCFPETRPSFRIRENRPPGTFHQFRLLPVQFLCPNISVAYRLLEGEGLPFRCAPDSLEVSTRWALDREQREKYELVAVCTVHAGAREEVVMVPFPVTVYDEDDSAPTFPAGVDTASAVVEFKRKEDTVVATLRVFDADVVPASGELVRRYTSTLLPGDTWAQQTFRVEHWPNETSVQANGSFVRATVHDYRLVLNRNLSISENRTMQLAVLVNDSDFQGPGAGVLLLHFNVSVLPVSLHLPSTYSLSVSRRARRFAQIGKVCVENCQAFSGINVQYKLHSSGANCSTLGVVTSAEDTSGILFVNDTKALRRPKCAELHYMVVATDQQTSRQAQAQLLVTVEGSYVAEEAGCPLSCAVSKRRLECEECGGLGSPTGRCEWRQGDGKGITRNFSTCSPSTKTCPDGHCDVVETQDINICPQDCLRGSIVGGHEPGEPRGIKAGYGTCNCFPEEEKCFCEPEDIQDPLCDELCR

SEQ ID NO: 2943 - protein, 207 aa, synthetic construct
  REGION 1..207: note = RNF128 (Q8TEB7) SP+PP+ECD
MGPPPGAGVSCRGGCGFSRLLAWCFLLALSPQAPGSRGAEAVWTAYLNVSWRVPHTGVNRTVWELSEEGVYGQDSPLEPVAGVLVPPDGPGALNACNPHTNFTVPTVWGSTVQVSWLALIQRGGGCTFADKIHLAYERGASGAVIFNFPGTRNEVIPMSHPGAVDIVAIMIGNLKGTKILQSIQRGIQVTMVIEVGKKHGPWVNHYS

SEQ ID NO: 2944 - protein, 182 aa, synthetic construct
  REGION 1..182: note = RNF13 (O43567) SP+PP+ECD
MLLSIGMLMLSATQVYTILTVQLFAFLNLLPVEADILAYNFENASQTFDDLPARFGYRLPAEGLKGFLINSKPENACEPIVPPPVKDNSSGTFIVLIRRLDCNFDIKVLNAQRAGYKAAIVHNVDSDDLISMGSNDIEVLKKIDIPSVFIGESSANSLKDEFTYEKGGHLILVPEFSLPLEY

SEQ ID NO: 2945 - protein, 194 aa, synthetic construct
  REGION 1..194: note = RNF130 (Q86XS8) SP+PP+ECD
MSCAGRAGPARLAALALLTCSLWPARADNASQEYYTALINVTVQEPGRGAPLTFRIDRGRYGLDSPKAEVRGQVLAPLPLHGVADHLGCDPQTRFFVPPNIKQWIALLQRGNCTFKEKISRAAFHNAVAVVIYNNKSKEEPVTMTHPGTGDIIAVMITELRGKDILSYLEKNISVQMTIAVGTRMPPKNFSRGS

SEQ ID NO: 2946 - protein, 200 aa, synthetic construct
  REGION 1..200: note = RNF149 (Q8NC42) SP+PP+ECD
MAWRRREASVGARGVLALALLALALCVPGARGRALEWFSAVVNIEYVDPQTNLTVWSVSESGRFGDSSPKEGAHGLVGVPWAPGGDLEGCAPDTRFFVPEPGGRGAAPWVALVARGGCTFKDKVLVAARRNASAVVLYNEERYGNITLPMSHAGTGNIVVIMISYPKGREILELVQKGIPVTMTIGVGTRHVQEFISGQS

SEQ ID NO: 2947 - protein, 208 aa, synthetic construct
  REGION 1..208: note = RNF150 (Q9ULK6) SP+PP+ECD
MAMSLIQACCSLALSTWLLSFCFVHLLCLDFTVAEKEEWYTAFVNITYAEPAPDPGAGAAGGGGAELHTEKTECGRYGEHSPKQDARGEVVMASSAHDRLACDPNTKFAAPTRGKNWIALIPKGNCTYRDKIRNAFLQNASAVVIFNVGSNTNETITMPHAGVEDIVAIMIPEPKGKEIVSLLERNITVTMYITIGTRNLQKYVSRTS

SEQ ID NO: 2948 - protein, 173 aa, synthetic construct
  REGION 1..173: note = RNF167 (Q9H6Y7) SP+PP+ECD
MHPAAFPLPVVVAAVLWGAAPTRGLIRATSDHNASMDFADLPALFGATLSQEGLQGFLVEAHPDNACSPIAPPPPAPVNGSVFIALLRRFDCNFDLKVLNAQKAGYGAAVVHNVNSNELLNMVWNSEEIQQQIWIPSVFIGERSSEYLRALFVYEKGARVLLVPDNTFPLGYY

SEQ ID NO: 2949 - protein, 197 aa, synthetic construct
  REGION 1..197: note = RNF43 (Q68DV7) SP+PP+ECD
MSGGHQLQLAALWPWLLMATLQAGFGRTGLVLAAAVESERSAEQKAIIRVIPLKMDPTGKLNLTLEGVFAGVAEITPAEGKLMQSHPLYLCNASDDDNLEPGFISIVKLESPRRAPRPCLSLASKARMAGERGASAVLFDITEDRAAAEQLQQPLGLTWPVVLIWGNDAEKLMEFVYKNQKAHVRIELKEPPAWPDY

SEQ ID NO: 2950 - protein, 897 aa, synthetic construct
  REGION 1..897: note = ROBO1 (Q9Y6N7) SP+PP+ECD
MKWKHVPFLVMISLLSLSPNHLFLAQLIPDPEDVERGNDHGTPIPTSDNDDNSLGYTGSRLRQEDFPPRIVEHPSDLIVSKGEPATLNCKAEGRPTPTIEWYKGGERVETDKDDPRSHRMLLPSGSLFFLRIVHGRKSRPDEGVYVCVARNYLGEAVSHNASLEVAILRDDFRQNPSDVMVAVGEPAVMECQPPRGHPEPTISWKKDGSPLDDKDERITIRGGKLMITYTRKSDAGKYVCVGTNMVGERESEVAELTVLERPSFVKRPSNLAVTVDDSAEFKCEARGDPVPTVRWRKDDGELPKSRYEIRDDHTLKIRKVTAGDMGSYTCVAENMVGKAEASATLTVQEPPHFVVKPRDQVVALGRTVTFQCEATGNPQPAIFWRREGSQNLLFSYQPPQSSSRFSVSQTGDLTITNVQRSDVGYYICQTLNVAGSIITKAYLEVTDVIADRPPPVIRQGPVNQTVAVDGTFVLSCVATGSPVPTILWRKDGVLVSTQDSRIKQLENGVLQIRYAKLGDTGRYTCIASTPSGEATWSAYIEVQEFGVPVQPPRPTDPNLIPSAPSKPEVTDVSRNTVTLSWQPNLNSGATPTSYIIEAFSHASGSSWQTVAENVKTETSAIKGLKPNAIYLFLVRAANAYGISDPSQISDPVKTQDVLPTSQGVDHKQVQRELGNAVLHLHNPTVLSSSSIEVHWTVDQQSQYIQGYKILYRPSGANHGESDWLVFEVRTPAKNSVVIPDLRKGVNYEIKARPFFNEFQGADSEIKFAKTLEEAPSAPPQGVTVSKNDGNGTAILVSWQPPPEDTQNGMVQEYKVWCLGNETRYHINKTVDGSTFSVVIPFLVPGIRYSVEVAASTGAGSGVKSEPQFIQLDAHGNPVSPEDQVSLAQQISDVVKQP

SEQ ID NO: 2951 - protein, 859 aa, synthetic construct
  REGION 1..859: note = ROBO2 (Q9HCK4) SP+PP+ECD
MSLLMFTQLLLCGFLYVRVDGSRLRQEDFPPRIVEHPSDVIVSKGEPTTLNCKAEGRPTPTIEWYKDGERVETDKDDPRSHRMLLPSGSLFFLRIVHGRRSKPDEGSYVCVARNYLGEAVSRNASLEVALLRDDFRQNPTDVVVAAGEPAILECQPPRGHPEPTIYWKKDKVRIDDKEERISIRGGKLMISNTRKSDAGMYTCVGTNMVGERDSDPAELTVFERPTFLRRPINQVVLEEEAVEFRCQVQGDPQPTVRWKKDDADLPRGRYDIKDDYTLRIKKTMSTDEGTYMCIAENRVGKMEASATLTVRAPPQFVVRPRDQIVAQGRTVTFPCETKGNPQPAVFWQKEGSQNLLFPNQPQQPNSRCSVSPTGDLTITNIQRSDAGYYICQALTVAGSILAKAQLEVTDVLTDRPPPIILQGPANQTLAVDGTALLKCKATGDPLPVISWLKEGFTFPGRDPRATIQEQGTLQIKNLRISDTGTYTCVATSSSGETSWSAVLDVTESGATISKNYDLSDLPGPPSKPQVTDVTKNSVTLSWQPGTPGTLPASAYIIEAFSQSVSNSWQTVANHVKTTLYTVRGLRPNTIYLFMVRAINPQGLSDPSPMSDPVRTQDISPPAQGVDHRQVQKELGDVLVRLHNPVVLTPTTVQVTWTVDRQPQFIQGYRVMYRQTSGLQATSSWQNLDAKVPTERSAVLVNLKKGVTYEIKVRPYFNEFQGMDSESKTVRTTEEAPSAPPQSVTVLTVGSYNSTSISVSWDPPPPDHQNGIIQEYKIWCLGNETRFHINKTVDAAIRSVIIGGLFPGIQYRVEVAASTSAGVGVKSEPQPIIIGRRNEVVITENNNSITEQITDVVKQP

SEQ ID NO: 2952 - protein, 891 aa, synthetic construct
  REGION 1..891: note = ROBO3 (Q96MS0) SP+PP+ECD
MLRYLLKTLLQMNLFADSLAGDISNSSELLLGFNSSLAALNHTLLPPGDPSLNGSRVGPEDAMPRIVEQPPDLLVSRGEPATLPCRAEGRPRPNIEWYKNGARVATVREDPRAHRLLLPSGALFFPRIVHGRRARPDEGVYTCVARNYLGAAASRNASLEVAVLRDDFRQSPGNVVVAVGEPAVLECVPPRGHPEPSVSWRKDGARLKEEEGRITIRGGKLMMSHTLKSDAGMYVCVASNMAGERESAAAEVMVLERPSFLRRPVNQVVLADAPVTFLCEVKGDPPPRLRWRKEDGELPTGRYEIRSDHSLWIGHVSAEDEGTYTCVAENSVGRAEASGSLSVHVPPQLVTQPQDQMAAPGESVAFQCETKGNPPPAIFWQKEGSQVLLFPSQSLQPTGRFSVSPRGQLNITAVQRGDAGYYVCQAVSVAGSILAKALLEIKGASLDGLPPVILQGPANQTLVLGSSVWLPCRVTGNPQPSVRWKKDGQWLQGDDLQFKTMANGTLYIANVQEMDMGFYSCVAKSSTGEATWSGWLKMREDWGVSPDPPTEPSSPPGAPSQPVVTEITKNSITLTWKPNPQTGAAVTSYVIEAFSPAAGNTWRTVADGVQLETHTVSGLQPNTIYLFLVRAVGAWGLSEPSPVSEPVRTQDSSPSRPVEDPWRGQQGLAEVAVRLQEPIVLGPRTLQVSWTVDGPVQLVQGFRVSWRVAGPEGGSWTMLDLQSPSQQSTVLRGLPPGTQIQIKVQAQGQEGLGAESLSVTRSIPEEAPSGPPQGVAVALGGDGNSSITVSWEPPLPSQQNGVITEYQIWCLGNESRFHLNRSAAGWARSAMLRGLVPGLLYRTLVAAATSAGVGVPSAPVLVQLPSPPDLEPGLEVGAGLAVRLARVLREP

SEQ ID NO: 2953 - protein, 406 aa, synthetic construct
  REGION 1..406: note = ROR1 (Q01973) SP+PP+ECD
MHRPRRRGTRPPLLALLAALLLAARGAAAQETELSVSAELVPTSSWNISSELNKDSYLTLDEPMNNITTSLGQTAELHCKVSGNPPPTIRWFKNDAPVVQEPRRLSFRSTIYGSRLRIRNLDTTDTGYFQCVATNGKEVVSSTGVLFVKFGPPPTASPGYSDEYEEDGFCQPYRGIACARFIGNRTVYMESLHMQGEIENQITAAFTMIGTSSHLSDKCSQFAIPSLCHYAFPYCDETSSVPKPRDLCRDECEILENVLCQTEYIFARSNPMILMRLKLPNCEDLPQPESPEAANCIRIGIPMADPINKNHKCYNSTGVDYRGTVSVTKSGRQCQPWNSQYPHTHTFTALRFPELNGGHSYCRNPGNQKEAPWCFTLDENFKSDLCDIPACDSKDSKEKNKMEILY

SEQ ID NO: 2954 - protein, 403 aa, synthetic construct
  REGION 1..403: note = ROR2 (Q01974) SP+PP+ECD
MARGSALPRRPLLCIPAVWAAAALLLSVSRTSGEVEVLDPNDPLGPLDGQDGPIPTLKGYFLNFLEPVNNITIVQGQTAILHCKVAGNPPPNVRWLKNDAPVVQEPRRIIIRKTEYGSRLRIQDLDTTDTGYYQCVATNGMKTITATGVLFVRLGPTHSPNHNFQDDYHEDGFCQPYRGIACARFIGNRTIYVDSLQMQGEIENRITAAFTMIGTSTHLSDQCSQFAIPSFCHFVFPLCDARSRTPKPRELCRDECEVLESDLCRQEYTIARSNPLILMRLQLPKCEALPMPESPDAANCMRIGIPAERLGRYHQCYNGSGMDYRGTASTTKSGHQCQPWALQHPHSHHLSSTDFPELGGGHAYCRNPGGQMEGPWCFTQNKNVRMELCDVPSCSPRDSSKMG

SEQ ID NO: 2955 - protein, 1859 aa, synthetic construct
  REGION 1..1859: note = ROS1 (P08922) SP+PP+ECD
MKNIYCLIPKLVNFATLGCLWISVVQCTVLNSCLKSCVTNLGQQLDLGTPHNLSEPCIQGCHFWNSVDQKNCALKCRESCEVGCSSAEGAYEEEVLENADLPTAPFASSIGSHNMTLRWKSANFSGVKYIIQWKYAQLLGSWTYTKTVSRPSYVVKPLHPFTEYIFRVVWIFTAQLQLYSPPSPSYRTHPHGVPETAPLIRNIESSSPDTVEVSWDPPQFPGGPILGYNLRLISKNQKLDAGTQRTSFQFYSTLPNTIYRFSIAAVNEVGEGPEAESSITTSSSAVQQEEQWLFLSRKTSLRKRSLKHLVDEAHCLRLDAIYHNITGISVDVHQQIVYFSEGTLIWAKKAANMSDVSDLRIFYRGSGLISSISIDWLYQRMYFIMDELVCVCDLENCSNIEEITPPSISAPQKIVADSYNGYVFYLLRDGIYRADLPVPSGRCAEAVRIVESCTLKDFAIKPQAKRIIYFNDTAQVFMSTFLDGSASHLILPRIPFADVKSFACENNDFLVTDGKVIFQQDALSFNEFIVGCDLSHIEEFGFGNLVIFGSSSQLHPLPGRPQELSVLFGSHQALVQWKPPALAIGANVILISDIIELFELGPSAWQNWTYEVKVSTQDPPEVTHIFLNISGTMLNVPELQSAMKYKVSVRASSPKRPGPWSEPSVGTTLVPASEPPFIMAVKEDGLWSKPLNSFGPGEFLSSDIGNVSDMDWYNNSLYYSDTKGDVFVWLLNGTDISENYHLPSIAGAGALAFEWLGHFLYWAGKTYVIQRQSVLTGHTDIVTHVKLLVNDMVVDSVGGYLYWTTLYSVESTRLNGESSLVLQTQPWFSGKKVIALTLDLSDGLLYWLVQDSQCIHLYTAVLRGQSTGDTTITEFAAWSTSEISQNALMYYSGRLFWINGFRIITTQEIGQKTSVSVLEPARFNQFTIIQTSLKPLPGNFSFTPKVIPDSVQESSFRIEGNASSFQILWNGPPAVDWGVVFYSVEFSAHSKFLASEQHSLPVFTVEGLEPYALFNLSVTPYTYWGKGPKTSLSLRAPETVPSAPENPRIFILPSGKCCNKNEVVVEFRWNKPKHENGVLTKFEIFYNISNQSITNKTCEDWIAVNVTPSVMSFQLEGMSPRCFIAFQVRAFTSKGPGPYADVVKSTTSEINPFPHLITLLGNKIVFLDMDQNQVVWTFSAERVISAVCYTADNEMGYYAEGDSLFLLHLHNRSSSELFQDSLVFDITVITIDWISRHLYFALKESQNGMQVFDVDLEHKVKYPREVKIHNRNSTIISFSVYPLLSRLYWTEVSNFGYQMFYYSIISHTLHRILQPTATNQQNKRNQCSCNVTEFELSGAMAIDTSNLEKPLIYFAKAQEIWAMDLEGCQCWRVITVPAMLAGKTLVSLTVDGDLIYWIITAKDSTQIYQAKKGNGAIVSQVKALRSRHILAYSSVMQPFPDKAFLSLASDTVEPTILNATNTSLTIRLPLAKTNLTWYGITSPTPTYLVYYAEVNDRKNSSDLKYRILEFQDSIALIEDLQPFSTYMIQIAVKNYYSDPLEHLPPGKEIWGKTKNGVPEAVQLINTTVRSDTSLIISWRESHKPNGPKESVRYQLAISHLALIPETPLRQSEFPNGRLTLLVTRLSGGNIYVLKVLACHSEEMWCTESHPVTVEMFNTPEKPYSLVPENTSLQFNWKAPLNVNLIRFWVELQKWKYNEFYHVKTSCSQGPAYVCNITNLQPYTSYNVRVVVVYKTGENSTSLPESFKTKAGVPNKPGIPKLLEGSKNSIQWEKAEDNGCRITYYILEIRKSTSNNLQNQNLRWKMTFNGSCSSVCTWKSKNLKGIFQFRVVAANNLGFGEYSGISENIILVGDDFWIPE

SEQ ID NO: 2956 - protein, 438 aa, synthetic construct
  REGION 1..438: note = RPN1 (P04843) SP+PP+ECD
MEAPAAGLFLLLLLGTWAPAPGSASSEAPPLINEDVKRTVDLSSHLAKVTAEVVLAHLGGGSTSRATSFLLALEPELEARLAHLGVQVKGEDEEENNLEVRETKIKGKSGRFFTVKLPVALDPGAKISVIVETVYTHVLHPYPTQITQSEKQFVVFEGNHYFYSPYPTKTQTMRVKLASRNVESYTKLGNPTRSEDLLDYGPFRDVPAYSQDTFKVHYENNSPFLTITSMTRVIEVSHWGNIAVEENVDLKHTGAVLKGPFSRYDYQRQPDSGISSIRSFKTILPAAAQDVYYRDEIGNVSTSHLLILDDSVEMEIRPRFPLFGGWKTHYIVGYNLPSYEYLYNLGDQYALKMRFVDHVFDEQVIDSLTVKIILPEGAKNIEIDSPYEISRAPDELHYTYLDTFGRPVIVAYKKNLVEQHIQDIVVHYTFNKVLMLQE

SEQ ID NO: 2957 - protein, 227 aa, synthetic construct
  REGION 1..227: note = RYK (P34925) SP+PP+ECD
MRGAARLGRPGRSCLPGARGLRAPPPPPLLLLLALLPLLPAPGAAAAPAPRPPELQSASAGPSVSLYLSEDEVRRLIGLDAELYYVRNDLISHYALSFSLLVPSETNFLHFTWHAKSKVEYKLGFQVDNVLAMDMPQVNISVQGEVPRTLSVFRVELSCTGKVDSEVMILMQLNLTVNSSKNFTVLNFKRRKMCYKKLEEVKTSALDKNTSRTIYDPVHAAPTTSTR

SEQ ID NO: 2958 - protein, 421 aa, synthetic construct
  REGION 1..421: note = SCARF1 (Q14162) SP+PP+ECD
MGLGLLLPLLLLWTRGTQGSELDPKGQHVCVASSPSAELQCCAGWRQKDQECTIPICEGPDACQKDEVCVKPGLCRCKPGFFGAHCSSRCPGQYWGPDCRESCPCHPHGQCEPATGACQCQADRWGARCEFPCACGPHGRCDPATGVCHCEPGWWSSTCRRPCQCNTAAARCEQATGACVCKPGWWGRRCSFRCNCHGSPCEQDSGRCACRPGWWGPECQQQCECVRGRCSAASGECTCPPGFRGARCELPCPAGSHGVQCAHSCGRCKHNEPCSPDTGSCESCEPGWNGTQCQQPCLPGTFGESCEQQCPHCRHGEACEPDTGHCQRCDPGWLGPRCEDPCPTGTFGEDCGSTCPTCVQGSCDTVTGDCVCSAGYWGPSCNASCPAGFHGNNCSVPCECPEGLCHPVSGSCQPGSGSRDT

SEQ ID NO: 2959 - protein, 441 aa, synthetic construct
  REGION 1..441: note = SCARF2 (Q96GP6) SP+PP+ECD
MEGAGPRGAGPARRRGAGGPPSPLLPSLLLLLLLWMLPDTVAPQELNPRGRNVCRAPGSQVPTCCAGWRQQGDECGIAVCEGNSTCSENEVCVRPGECRCRHGYFGANCDTKCPRQFWGPDCKELCSCHPHGQCEDVTGQCTCHARRWGARCEHACQCQHGTCHPRSGACRCEPGWWGAQCASACYCSATSRCDPQTGACLCHAGWWGRSCNNQCACNSSPCEQQSGRCQCRERTFGARCDRYCQCFRGRCHPVDGTCACEPGYRGKYCREPCPAGFYGLGCRRRCGQCKGQQPCTVAEGRCLTCEPGWNGTKCDQPCATGFYGEGCSHRCPPCRDGHACNHVTGKCTRCNAGWIGDRCETKCSNGTYGEDCAFVCADCGSGHCDFQSGRCLCSPGVHGPHCNVTCPPGLHGADCAQACSCHEDTCDPVTGACHLETNQRK

SEQ ID NO: 2960 - protein, 906 aa, synthetic construct
  REGION 1..906: note = SCART1 (Q4G0T1) SP+PP+ECD
MRAALWTLGLGPLLLNLWAVPIGGPGALRLAYRHSTCDGVVLVRHHGAWGYVCNQEWTLAEASVVCRQLGCGPAVGAPKYVPLPGEMAQPWLHNVSCRGNESSLWECSLGSWCQSPCPHAWVVVALCSNGTFRELRLVKGRSPCAGLPEIRNVNGVDRLCVLHVEEAMVFCRELGCGPVLQAPRRDVGVVRKYLACRGTEPTIRSCRLDNNFRSGCDLRLDAEVVCSGHTEARLVGGEHPCAGRLEVTWGTVCDAALDLATAHVVCRELQCGAVVSTPEGARFGRGSGPVWTEAFRCAGNESLLFHCPRGRGSQCGHGHDAGLRCSEFRMVNGSSSCEGRVEFQVQGSWAPLCATHWDIADATVLCHQLNCGNAVAAPGGGHFGDGDAAIWPDAFHCEGTESYLWNCPVSTLGAPACAPGNTASAVCSGLAHALRLREGQSRCDGRVEVSLDGVWGRVLDDAWDLRGAGVVCRQLGCRGAQQAYDAPAPSRGSVQVALSRVRCLGTETRLTQCNVSATLQEPAGTSRDAGVVCSGEVGTASPMARRHGIPGALTLSLHREPQGAAGRGAGALHGGAWGTVCDDAWDLRDAHVVCRQLGCGRALSALGAAHFGAGAGRIWLDELGCQGHESALWQCPSAGWGRHDWRHKEDAGVFCSESVALRLRGGTCCCAGWLDVFYNGTWGAMCSNALKDLSLSIICKQLGCGVWGVGLAGEQALPLCGHRDRLGGQHRVPQAAQLHSVAMPFPPMAPALLRPSRAGLSEDRPQAAGEPLNCSSWLGCPEEGALRVRGGEDRCSGRVELWHAGSWGTVCDDGWDLADAEVVCRQLGCGRAVAALGAAAFGPGSGPVWLDEVGCRGSEASLWGCPAERWGRGDRAHEEDAGVRCWEPGPGPPLPAAPFRTFWVVS

SEQ ID NO: 2961 - protein, 160 aa, synthetic construct
  REGION 1..160: note = SCN1B (Q07699) SP+PP+ECD
MGRLLALVVGAALVSSACGGCVEVDSETEAVYGMTFKILCISCKRRSETNAETFTEWTFRQKGTEEFVKILRYENEVLQLEEDERFEGRVVWNGSRGTKDLQDLSIFITNVTYNHSGDYECHVYRLLFFENYEHNTSVVKKIHIEVVDKANRDMASIVSE

SEQ ID NO: 2962 - protein, 159 aa, synthetic construct
  REGION 1..159: note = SCN2B (O60939) SP+PP+ECD
MHRDAWLPRPAFSLTGLSLFFSLVPPGRSMEVTVPATLNVLNGSDARLPCTFNSCYTVNHKQFSLNWTYQECNNCSEEMFLQFRMKIINLKLERFQDRVEFSGNPSKYDVSVMLRNVQPEDEGIYNCYIMNPPDRHRGHGKIHLQVLMEEPPERDSTVA

SEQ ID NO: 2963 - protein, 159 aa, synthetic construct
  REGION 1..159: note = SCN3B (Q9NY72) SP+PP+ECD
MPAFNRLFPLASLVLIYWVSVCFPVCVEVPSETEAVQGNPMKLRCISCMKREEVEATTVVEWFYRPEGGKDFLIYEYRNGHQEVESPFQGRLQWNGSKDLQDVSITVLNVTLNDSGLYTCNVSREFEFEAHRPFVKTTRLIPLRVTEEAGEDFTSVVSE

SEQ ID NO: 2964 - protein, 162 aa, synthetic construct
  REGION 1..162: note = SCN4B (Q8IWT1) SP+PP+ECD
MPGAGDGGKAPARWLGTGLLGLFLLPVTLSLEVSVGKATDIYAVNGTEILLPCTFSSCFGFEDLHFRWTYNSSDAFKILIEGTVKNEKSDPKVTLKDDDRITLVGSTKEKMNNISIVLRDLEFSDTGKYTCHVKNPKENNLQHHATIFLQVVDRLEEVDNTV

SEQ ID NO: 2965 - protein, 254 aa, synthetic construct
  REGION 1..254: note = SDC1 (P18827) SP+PP+ECD
MRRAALWLWLCALALSLQPALPQIVATNLPPEDQDGSGDDSDNFSGSGAGALQDITLSQQTPSTWKDTQLLTAIPTSPEPTGLEATAASTSTLPAGEGPKEGEAVVLPEVEPGLTAREQEATPRPRETTQLPTTHLASTTTATTAQEPATSHPHRDMQPGHHETSTPAGPSQADLHTPHTEDGGPSATERAAEDGASSQLPAAEGSGEQDFTFETSGENTAVVAVEPDRRNQSPVDQGATGASQGLLDRKEVLG

SEQ ID NO: 2966 - protein, 144 aa, synthetic construct
  REGION 1..144: note = SDC2 (P34741) SP+PP+ECD
MRRAWILLTLGLVACVSAESRAELTSDKDMYLDNSSIEEASGVYPIDDDDYASASGSGADEDVESPELTTSRPLPKILLTSAAPKVETTTLNIQNKIPAQTKSPEETDKEKVHLSDSERKMDPAEEDTNVYTEKHSDSLFKRTE

SEQ ID NO: 2967 - protein, 1932 aa, synthetic construct
  REGION 1..1932: note = SDK2 (Q58EX2) SP+PP+ECD
MWGLLIWTLLALHQIRAARAQDDVSPYFKTEPVRTQVHLEGNRLVLTCMAEGSWPLEFKWLHNNRELTKFSLEYRYMITSLDRTHAGFYRCIVRNRMGALLQRQTEVQVAYMGSFEEGEKHQSVSHGEAAVIRAPRIASFPQPQVTWFRDGRKIPPSSRIAITLENTLVILSTVAPDAGRYYVQAVNDKNGDNKTSQPITLTVENVGGPADPIAPTIIIPPKNTSVVAGTSEVTLECVANARPLIKLHIIWKKDGVLLSGGISDHNRRLTIPNPTGSDAGYYECEAVLRSSSVPSVVRGAYLSVLEPPQFVKEPERHITAEMEKVVDIPCQAKGVPPPSITWYKDAAVVEVEKLTRFRQRNDGGLQISGLVPDDTGMFQCFARNAAGEVQTSTYLAVTSIAPNITRGPLDSTVIDGMSVVLACETSGAPRPAITWQKGERILASGSVQLPRFTPLESGSLLISPTHISDAGTYTCLATNSRGVDEASADLVVWARTRITKPPQDQSVIKGTQASMVCGVTHDPRVTIRYIWEKDGATLGTESHPRIRLDRNGSLHISQTWSGDIGTYTCRVISAGGNDSRSAHLRVRQLPHAPEHPVATLSTVERRAINLTWTKPFDGNSPLIRYILEMSENNAPWTVLLASVDPKATSVTVKGLVPARSYQFRLCAVNDVGKGQFSKDTERVSLPEEPPTAPPQNVIASGRTNQSIMIQWQPPPESHQNGILKGYIIRYCLAGLPVGYQFKNITDADVNNLLLEDLIIWTNYEIEVAAYNSAGLGVYSSKVTEWTLQGVPTVPPGNVHAEATNSTTIRFTWNAPSPQFINGINQGYKLIAWEPEQEEEVTMVTARPNFQDSIHVGFVSGLKKFTEYFTSVLCFTTPGDGPRSTPQLVRTHEDVPGPVGHLSFSEILDTSLKVSWQEPGEKNGILTGYRISWEEYNRTNTRVTHYLPNVTLEYRVTGLTALTTYTIEVAAMTSKGQGQVSASTISSGVPPELPGPPTNLGISNIGPRSVTLQFRPGYDGKTSISRWLVEAQVGVVGEGEEWLLIHQLSNEPDARSMEVPDLNPFTCYSFRMRQVNIVGTSPPSQPSRKIQTLQAPPDMAPANVSLRTASETSLWLRWMPLPEMEYNGNPESVGYKIKYSRSDGHGKTLSHVVQDRVERDYTIEDLEEWTEYRVQVQAFNAIGSGPWSQTVVGRTRESVPSSGPTNVSALATTSSSMLVRWSEVPEADRNGLVLGYKVMYKEKDSDTQPRFWLVEGNSSRSAQLTGLGKYVLYEVQVLAFTRIGDGSPSHPPILERTLDDVPGPPMGILFPEVRTTSVRLIWQPPAAPNGIILAYQITHRLNTTTANTATVEVLAPSARQYTATGLKPESVYLFRITAQTRKGWGEAAEALVVTTEKRDRPQPPSRPMVQQEDVRARSVLLSWEPGSDGLSPVRYYTIQTRELPSGRWALHSASVSHNASSFIVDRLKPFTSYKFRVKATNDIGDSEFSEESESLTTLQAAPDEAPTILSVTPHTTTSVLIRWQPPAEDKINGILLGFRIRYRELLYEGLRGFTLRGINNPGATWAELTSMYSMRNLSRPSLTQYELDNLNKHRRYEIRMSVYNAVGEGPSSPPQEVFVGEAVPTAAPRNVVVHGATATQLDVTWEPPPLDSQNGDIQGYKIYFWEAQRGNLTERVKTLFLAENSVKLKNLTGYTAYMVSVAAFNAAGDGPRSTPTQGQTQQAAPSAPSSVKFSELTTTSVNVSWEAPQFPNGILEGYRLVYEPCSPVDGVSKIVTVDVKGNSPLWLKVKDLAEGVTYRFRIRAKTFTYGPEIEANVTTGPGEGAPGPPGVPIIVRYSSAIAIHWSSGDPGKGPITRYVIEARPSDEGLWDILIKDIPKEVSSYTFSMDILKPGVSYDFRVIAVNDYGFGTPSSPSQSVPAQKANPFYEEWWF

SEQ ID NO: 2968 - protein, 145 aa, synthetic construct
  REGION 1..145: note = SECTM1 (Q8WVN6) SP+PP+ECD
MQTCPLAFPGHVSQALGTLLFLAASLSAQNEGWDSPICTEGVVSVSWGENTVMSCNISNAFSHVNIKLRAHGQESAIFNEVAPGYFSRDGWQLQVQGGVAQLVIKGARDSHAGLYMWHLVGHQRNNRQVTLEVSGAEPQSAPDTG

SEQ ID NO: 2969 - protein, 556 aa, synthetic construct
  REGION 1..556: note = SELE (P16581) SP+PP+ECD
MIASQFLSALTLVLLIKESGAWSYNTSTEAMTYDEASAYCQQRYTHLVAIQNKEEIEYLNSILSYSPSYYWIGIRKVNNVWVWVGTQKPLTEEAKNWAPGEPNNRQKDEDCVEIYIKREKDVGMWNDERCSKKKLALCYTAACTNTSCSGHGECVETINNYTCKCDPGFSGLKCEQIVNCTALESPEHGSLVCSHPLGNFSYNSSCSISCDRGYLPSSMETMQCMSSGEWSAPIPACNVVECDAVTNPANGFVECFQNPGSFPWNTTCTFDCEEGFELMGAQSLQCTSSGNWDNEKPTCKAVTCRAVRQPQNGSVRCSHSPAGEFTFKSSCNFTCEEGFMLQGPAQVECTTQGQWTQQIPVCEAFQCTALSNPERGYMNCLPSASGSFRYGSSCEFSCEQGFVLKGSKRLQCGPTGEWDNEKPTCEAVRCDAVHQPPKGLVRCAHSPIGEFTYKSSCAFSCEEGFELHGSTQLECTSQGQWTEEVPSCQVVKCSSLAVPGKINMSCSGEPVFGTVCKFACPEGWTLNGSAARTCGATGHWSGLLPTCEAPTESNIP

SEQ ID NO: 2970 - protein, 332 aa, synthetic construct
  REGION 1..332: note = SELL (P14151) SP+PP+ECD
MIFPWKCQSTQRDLWNIFKLWGWTMLCCDFLAHHGTDCWTYHYSEKPMNWQRARRFCRDNYTDLVAIQNKAEIEYLEKTLPFSRSYYWIGIRKIGGIWTWVGTNKSLTEEAENWGDGEPNNKKNKEDCVEIYIKRNKDAGKWNDDACHKLKAALCYTASCQPWSCSGHGECVEIINNYTCNCDVGYYGPQCQFVIQCEPLEAPELGTMDCTHPLGNFSFSSQCAFSCSEGTNLTGIEETTCGPFGNWSSPEPTCQVIQCEPLSAPDLGIMNCSHPLASFSFTSACTFICSEGTELIGKKKTICESSGIWSNPSPICQKLDKSFSMIKEGDYN

SEQ ID NO: 2971 - protein, 771 aa, synthetic construct
  REGION 1..771: note = SELP (P16109) SP+PP+ECD
MANCQIAILYQRFQRVVFGISQLLCFSALISELTNQKEVAAWTYHYSTKAYSWNISRKYCQNRYTDLVAIQNKNEIDYLNKVLPYYSSYYWIGIRKNNKTWTWVGTKKALTNEAENWADNEPNNKRNNEDCVEIYIKSPSAPGKWNDEHCLKKKHALCYTASCQDMSCSKQGECLETIGNYTCSCYPGFYGPECEYVRECGELELPQHVLMNCSHPLGNFSFNSQCSFHCTDGYQVNGPSKLECLASGIWTNKPPQCLAAQCPPLKIPERGNMTCLHSAKAFQHQSSCSFSCEEGFALVGPEVVQCTASGVWTAPAPVCKAVQCQHLEAPSEGTMDCVHPLTAFAYGSSCKFECQPGYRVRGLDMLRCIDSGHWSAPLPTCEAISCEPLESPVHGSMDCSPSLRAFQYDTNCSFRCAEGFMLRGADIVRCDNLGQWTAPAPVCQALQCQDLPVPNEARVNCSHPFGAFRYQSVCSFTCNEGLLLVGASVLQCLATGNWNSVPPECQAIPCTPLLSPQNGTMTCVQPLGSSSYKSTCQFICDEGYSLSGPERLDCTRSGRWTDSPPMCEAIKCPELFAPEQGSLDCSDTRGEFNVGSTCHFSCDNGFKLEGPNNVECTTSGRWSATPPTCKGIASLPTPGLQCPALTTPGQGTMYCRHHPGTFGFNTTCYFGCNAGFTLIGDSTLSCRPSGQWTAVTPACRAVKCSELHVNKPIAMNCSNLWGNFSYGSICSFHCLEGQLLNGSAQTACQENGHWSTTVPTCQAGPLTIQEA

SEQ ID NO: 2972 - protein, 320 aa, synthetic construct
  REGION 1..320: note = SELPLG (Q14242) SP+PP+ECD
MPLQLLLLLILLGPGNSLQLWDTWADEAEKALGPLLARDRRQATEYEYLDYDFLPETEPPEMLRNSTDTTPLTGPGTPESTTVEPAARRSTGLDAGGAVTELTTELANMGNLSTDSAAMEIQTTQPAATEAQTTQPVPTEAQTTPLAATEAQTTRLTATEAQTTPLAATEAQTTPPAATEAQTTQPTGLEAQTTAPAAMEAQTTAPAAMEAQTTPPAAMEAQTTQTTAMEAQTTAPEATEAQTTQPTATEAQTTPLAAMEALSTEPSATEALSMEPTTKRGLFIPFSVSSVTHKGIPMAASNLSVNYPVGAPDHISVKQC

SEQ ID NO: 2973 - protein, 683 aa, synthetic construct
  REGION 1..683: note = SEMA4A (Q9H3S1) SP+PP+ECD
MALPALGLDPWSLLGLFLFQLLQLLLPTTTAGGGGQGPMPRVRYYAGDERRALSFFHQKGLQDFDTLLLSGDGNTLYVGAREAILALDIQDPGVPRLKNMIPWPASDRKKSECAFKKKSNETQCFNFIRVLVSYNVTHLYTCGTFAFSPACTFIELQDSYLLPISEDKVMEGKGQSPFDPAHKHTAVLVDGMLYSGTMNNFLGSEPILMRTLGSQPVLKTDNFLRWLHHDASFVAAIPSTQVVYFFFEETASEFDFFERLHTSRVARVCKNDVGGEKLLQKKWTTFLKAQLLCTQPGQLPFNVIRHAVLLPADSPTAPHIYAVFTSQWQVGGTRSSAVCAFSLLDIERVFKGKYKELNKETSRWTTYRGPETNPRPGSCSVGPSSDKALTFMKDHFLMDEQVVGTPLLVKSGVEYTRLAVETAQGLDGHSHLVMYLGTTTGSLHKAVVSGDSSAHLVEEIQLFPDPEPVRNLQLAPTQGAVFVGFSGGVWRVPRANCSVYESCVDCVLARDPHCAWDPESRTCCLLSAPNLNSWKQDMERGNPEWACASGPMSRSLRPQSRPQIIKEVLAVPNSILELPCPHLSALASYYWSHGPAAVPEASSTVYNGSLLLIVQDGVGGLYQCWATENGFSYPVISYWVDSQDQTLALDPELAGIPREHVKVPLTRVSGGAALAAQQSYWPH

SEQ ID NO: 2974 - protein, 717 aa, synthetic construct
  REGION 1..717: note = SEMA4B (Q9NPR2) SP+PP+ECD
MLRTAMGLRSWLAAPWGALPPRPPLLLLLLLLLLLQPPPPTWALSPRISLPLGSEERPFLRFEAEHISNYTALLLSRDGRTLYVGAREALFALSSNLSFLPGGEYQELLWGADAEKKQQCSFKGKDPQRDCQNYIKILLPLSGSHLFTCGTAAFSPMCTYINMENFTLARDEKGNVLLEDGKGRCPFDPNFKSTALVVDGELYTGTVSSFQGNDPAISRSQSLRPTKTESSLNWLQDPAFVASAYIPESLGSLQGDDDKIYFFFSETGQEFEFFENTIVSRIARICKGDEGGERVLQQRWTSFLKAQLLCSRPDDGFPFNVLQDVFTLSPSPQDWRDTLFYGVFTSQWHRGTTEGSAVCVFTMKDVQRVFSGLYKEVNRETQQWYTVTHPVPTPRPGACITNSARERKINSSLQLPDRVLNFLKDHFLMDGQVRSRMLLLQPQARYQRVAVHRVPGLHHTYDVLFLGTGDGRLHKAVSVGPRVHIIEELQIFSSGQPVQNLLLDTHRGLLYAASHSGVVQVPMANCSLYRSCGDCLLARDPYCAWSGSSCKHVSLYQPQLATRPWIQDIEGASAKDLCSASSVVSPSFVPTGEKPCEQVQFQPNTVNTLACPLLSNLATRLWLRNGAPVNASASCHVLPTGDLLLVGTQQLGEFQCWSLEEGFQQLVASYCPEVVEDGVADQTDEGGSVPVIISTSRVSAPAGGKASWGADRSYWKE

SEQ ID NO: 2975 - protein, 663 aa, synthetic construct
  REGION 1..663: note = SEMA4C (Q9C0C4) SP+PP+ECD
MAPHWAVWLLAARLWGLGIGAEVWWNLVPRKTVSSGELATVVRRFSQTGIQDFLTLTLTEPTGLLYVGAREALFAFSMEALELQGAISWEAPVEKKTECIQKGKNNQTECFNFIRFLQPYNASHLYVCGTYAFQPKCTYVNMLTFTLEHGEFEDGKGKCPYDPAKGHAGLLVDGELYSATLNNFLGTEPIILRNMGPHHSMKTEYLAFWLNEPHFVGSAYVPESVGSFTGDDDKVYFFFRERAVESDCYAEQVVARVARVCKGDMGGARTLQRKWTTFLKARLACSAPNWQLYFNQLQAMHTLQDTSWHNTTFFGVFQAQWGDMYLSAICEYQLEEIQRVFEGPYKEYHEEAQKWDRYTDPVPSPRPGSCINNWHRRHGYTSSLELPDNILNFVKKHPLMEEQVGPRWSRPLLVKKGTNFTHLVADRVTGLDGATYTVLFIGTGDGWLLKAVSLGPWVHLIEELQLFDQEPMRSLVLSQSKKLLFAGSRSQLVQLPVADCMKYRSCADCVLARDPYCAWSVNTSRCVAVGGHSGSLLIQHVMTSDTSGICNLRGSKKVRPTPKNITVVAGTDLVLPCHLSSNLAHARWTFGGRDLPAEQPGSFLYDARLQALVVMAAQPRHAGAYHCFSEEQGARLAAEGYLVAVVAGPSVTLEARAPLENLG

SEQ ID NO: 2976 - protein, 734 aa, synthetic construct
  REGION 1..734: note = SEMA4D (Q92854) SP+PP+ECD
MRMCTPIRGLLMALAVMFGTAMAFAPIPRITWEHREVHLVQFHEPDIYNYSALLLSEDKDTLYIGAREAVFAVNALNISEKQHEVYWKVSEDKKAKCAEKGKSKQTECLNYIRVLQPLSATSLYVCGTNAFQPACDHLNLTSFKFLGKNEDGKGRCPFDPAHSYTSVMVDGELYSGTSYNFLGSEPIISRNSSHSPLRTEYAIPWLNEPSFVFADVIRKSPDSPDGEDDRVYFFFTEVSVEYEFVFRVLIPRIARVCKGDQGGLRTLQKKWTSFLKARLICSRPDSGLVFNVLRDVFVLRSPGLKVPVFYALFTPQLNNVGLSAVCAYNLSTAEEVFSHGKYMQSTTVEQSHTKWVRYNGPVPKPRPGACIDSEARAANYTSSLNLPDKTLQFVKDHPLMDDSVTPIDNRPRLIKKDVNYTQIVVDRTQALDGTVYDVMFVSTDRGALHKAISLEHAVHIIEETQLFQDFEPVQTLLLSSKKGNRFVYAGSNSGVVQAPLAFCGKHGTCEDCVLARDPYCAWSPPTATCVALHQTESPSRGLIQEMSGDASVCPDKSKGSYRQHFFKHGGTAELKCSQKSNLARVFWKFQNGVLKAESPKYGLMGRKNLLIFNLSEGDSGVYQCLSEERVKNKTVFQVVAKHVLEVKVVPKPVVAPTLSVVQTEGSRIATKVLVASTQGSSPPTPAVQATSSGAITLPPKPAPTGTSCEPKIVINTVPQLHSEKTMYLKSSDNR

SEQ ID NO: 2977 - protein, 659 aa, synthetic construct
  REGION 1..659: note = SEMA4F (O95754) SP+PP+ECD
MPASAARPRPGPGQPTASPFPLLLLAVLSGPVSGRVPRSVPRTSLPISEADSCLTRFAVPHTYNYSVLLVDPASHTLYVGARDTIFALSLPFSGERPRRIDWMVPEAHRQNCRKKGKKEDECHNFVQILAIANASHLLTCGTFAFDPKCGVIDVSRFQQVERLESGRGKCPFEPAQRSAAVMAGGVLYAATVKNYLGTEPIITRAVGRAEDWIRTDTLPSWLNAPAFVAAVALSPAEWGDEDGDDEIYFFFTETSRAFDSYERIKVPRVARVCAGDLGGRKTLQQRWTTFLKADLLCPGPEHGRASSVLQDVAVLRPELGAGTPIFYGIFSSQWEGATISAVCAFRPQDIRTVLNGPFRELKHDCNRGLPVVDNDVPQPRPGECITNNMKLRHFGSSLSLPDRVLTFIRDHPLMDRPVFPADGHPLLVTTDTAYLRVVAHRVTSLSGKEYDVLYLGTEDGHLHRAVRIGAQLSVLEDLALFPEPQPVENMKLYHSWLLVGSRTEVTQVNTTNCGRLQSCSECILAQDPVCAWSFRLDECVAHAGEHRGLVQDIESADVSSLCPKEPGERPVVFEVPVATAAHVVLPCSPSSAWASCVWHQPSGVTALTPRRDGLEVVVTPGAMGAYACECQEGGAAHVVAAYSLVWGSQRDAPSRAHTV

SEQ ID NO: 2978 - protein, 675 aa, synthetic construct
  REGION 1..675: note = SEMA4G (Q9NTN9) SP+PP+ECD
MWGRLWPLLLSILTATAVPGPSLRRPSRELDATPRMTIPYEELSGTRHFKGQAQNYSTLLLEEASARLLVGARGALFSLSANDIGDGAHKEIHWEASPEMQSKCHQKGKNNQTECFNHVRFLQRLNSTHLYACGTHAFQPLCAAIDAEAFTLPTSFEEGKEKCPYDPARGFTGLIIDGGLYTATRYEFRSIPDIRRSRHPHSLRTEETPMHWLNDAEFVFSVLVRESKASAVGDDDKVYYFFTERATEEGSGSFTQSRSSHRVARVARVCKGDLGGKKILQKKWTSFLKARLICHIPLYETLRGVCSLDAETSSRTHFYAAFTLSTQWKTLEASAICRYDLAEIQAVFAGPYMEYQDGSRRWGRYEGGVPEPRPGSCITDSLRSQGYNSSQDLPSLVLDFVKLHPLMARPVVPTRGRPLLLKRNIRYTHLTGTPVTTPAGPTYDLLFLGTADGWIHKAVVLGSGMHIIEETQVFRESQSVENLVISLLQHSLYVGAPSGVIQLPLSSCSRYRSCYDCILARDPYCGWDPGTHACAAATTIANRTALIQDIERGNRGCESSRDTGPPPPLKTRSVLRGDDVLLPCDQPSNLARALWLLNGSMGLSDGQGGYRVGVDGLLVTDAQPEHSGNYGCYAEENGLRTLLASYSLTVRPATPAPAPKAPATPGAQLAPDVRL

SEQ ID NO: 2979 - protein, 968 aa, synthetic construct
  REGION 1..968: note = SEMA5A (Q13591) SP+PP+ECD
MKGTCVIAWLFSSLGLWRLAHPEAQGTTQCQRTEHPVISYKEIGPWLREFRAKNAVDFSQLTFDPGQKELVVGARNYLFRLQLEDLSLIQAVEWECDEATKKACYSKGKSKEECQNYIRVLLVGGDRLFTCGTNAFTPVCTNRSLSNLTEIHDQISGMARCPYSPQHNSTALLTAGGELYAATAMDFPGRDPAIYRSLGILPPLRTAQYNSKWLNEPNFVSSYDIGNFTYFFFRENAVEHDCGKTVFSRAARVCKNDIGGRFLLEDTWTTFMKARLNCSRPGEVPFYYNELQSTFFLPELDLIYGIFTTNVNSIAASAVCVFNLSAIAQAFSGPFKYQENSRSAWLPYPNPNPHFQCGTVDQGLYVNLTERNLQDAQKFILMHEVVQPVTTVPSFMEDNSRFSHVAVDVVQGREALVHIIYLATDYGTIKKVRVPLNQTSSSCLLEEIELFPERRREPIRSLQILHSQSVLFVGLREHVVKIPLKRCQFYRTRSTCIGAQDPYCGWDVVMKKCTSLEESLSMTQWEQSISACPTRNLTVDGHFGVWSPWTPCTHTDGSAVGSCLCRTRSCDSPAPQCGGWQCEGPGMEIANCSRNGGWTPWTSWSPCSTTCGIGFQVRQRSCSNPTPRHGGRVCVGQNREERYCNEHLLCPPHMFWTGWGPWERCTAQCGGGIQARRRICENGPDCAGCNVEYQSCNTNPCPELKKTTPWTPWTPVNISDNGGHYEQRFRYTCKARLADPNLLEVGRQRIEMRYCSSDGTSGCSTDGLSGDFLRAGRYSAHTVNGAWSAWTSWSQCSRDCSRGIRNRKRVCNNPEPKYGGMPCLGPSLEYQECNILPCPVDGVWSCWSPWTKCSATCGGGHYMRTRSCSNPAPAYGGDICLGLHTEEALCNTQPCPESWSEWSDWSECEASGVQVRARQCILLFPMGSQCSGNTTESRPCVFDSNFIPEVSVARSSSVEEKRCGEFNM

SEQ ID NO: 2980 - protein, 649 aa, synthetic construct
  REGION 1..649: note = SEMA6A (Q9H2E6) SP+PP+ECD
MRSEALLLYFTLLHFAGAGFPEDSEPISISHGNYTKQYPVFVGHKPGRNTTQRHRLDIQMIMIMNGTLYIAARDHIYTVDIDTSHTEEIYCSKKLTWKSRQADVDTCRMKGKHKDECHNFIKVLLKKNDDALFVCGTNAFNPSCRNYKMDTLEPFGDEFSGMARCPYDAKHANVALFADGKLYSATVTDFLAIDAVIYRSLGESPTLRTVKHDSKWLKEPYFVQAVDYGDYIYFFFREIAVEYNTMGKVVFPRVAQVCKNDMGGSQRVLEKQWTSFLKARLNCSVPGDSHFYFNILQAVTDVIRINGRDVVLATFSTPYNSIPGSAVCAYDMLDIASVFTGRFKEQKSPDSTWTPVPDERVPKPRPGCCAGSSSLERYATSNEFPDDTLNFIKTHPLMDEAVPSIFNRPWFLRTMVRYRLTKIAVDTAAGPYQNHTVVFLGSEKGIILKFLARIGNSGFLNDSLFLEEMSVYNSEKCSYDGVEDKRIMGMQLDRASSSLYVAFSTCVIKVPLGRCERYGKCKKTCIASRDPYCGWIKEGGACSHLSPNSRLTFEQDIERGNTDGLGDCHNSFVALNGHSSSLLPSTTTSDSTAQEGYESRGGMLDWKHLLDSPDSTDPLGAVSSHNHQDKKGVIRESYLKGHDQLVPVT

SEQ ID NO: 2981 - protein, 603 aa, synthetic construct
  REGION 1..603: note = SEMA6B (Q9H3T3) SP+PP+ECD
MQTPRASPPRPALLLLLLLLGGAHGLFPEEPPPLSVAPRDYLNHYPVFVGSGPGRLTPAEGADDLNIQRVLRVNRTLFIGDRDNLYRVELEPPTSTELRYQRKLTWRSNPSDINVCRMKGKQEGECRNFVKVLLLRDESTLFVCGSNAFNPVCANYSIDTLQPVGDNISGMARCPYDPKHANVALFSDGMLFTATVTDFLAIDAVIYRSLGDRPTLRTVKHDSKWFKEPYFVHAVEWGSHVYFFFREIAMEFNYLEKVVVSRVARVCKNDVGGSPRVLEKQWTSFLKARLNCSVPGDSHFYFNVLQAVTGVVSLGGRPVVLAVFSTPSNSIPGSAVCAFDLTQVAAVFEGRFREQKSPESIWTPVPEDQVPRPRPGCCAAPGMQYNASSALPDDILNFVKTHPLMDEAVPSLGHAPWILRTLMRHQLTRVAVDVGAGPWGNQTVVFLGSEAGTVLKFLVRPNASTSGTSGLSVFLEEFETYRPDRCGRPGGGETGQRLLSLELDAASGGLLAAFPRCVVRVPVARCQQYSGCMKNCIGSQDPYCGWAPDGSCIFLSPGTRAAFEQDVSGASTSGLGDCTGLLRASLSEDRAGLVSVNLLVTSS

SEQ ID NO: 2982 - protein, 604 aa, synthetic construct
  REGION 1..604: note = SEMA6C (Q9H3T2) SP+PP+ECD
MPRAPHFMPLLLLLLLLSLPHTQAAFPQDPLPLLISDLQGTSPLSWFRGLEDDAVAAELGLDFQRFLTLNRTLLVAARDHVFSFDLQAEEEGEGLVPNKYLTWRSQDVENCAVRGKLTDECYNYIRVLVPWDSQTLLACGTNSFSPVCRSYGITSLQQEGEELSGQARCPFDATQSNVAIFAEGSLYSATAADFQASDAVVYRSLGPQPPLRSAKYDSKWLREPHFVQALEHGDHVYFFFREVSVEDARLGRVQFSRVARVCKRDMGGSPRALDRHWTSFLKLRLNCSVPGDSTFYFDVLQALTGPVNLHGRSALFGVFTTQTNSIPGSAVCAFYLDEIERGFEGKFKEQRSLDGAWTPVSEDRVPSPRPGSCAGVGGAALFSSSRDLPDDVLTFIKAHPLLDPAVPPVTHQPLLTLTSRALLTQVAVDGMAGPHSNITVMFLGSNDGTVLKVLTPGGRSGGPEPILLEEIDAYSPARCSGKRTAQTARRIIGLELDTEGHRLFVAFSGCIVYLPLSRCARHGACQRSCLASQDPYCGWHSSRGCVDIRGSGGTDVDQAGNQESMEHGDCQDGATGSQSGPGDSAYGVRRDLPPASASRSVPIP

SEQ ID NO: 2983 - protein, 662 aa, synthetic construct
  REGION 1..662: note = SEMA6D (Q8NFY4) SP+PP+ECD
MRVFLLCAYILLLMVSQLRAVSFPEDDEPLNTVDYHYSRQYPVFRGRPSGNESQHRLDFQLMLKIRDTLYIAGRDQVYTVNLNEMPKTEVIPNKKLTWRSRQQDRENCAMKGKHKDECHNFIKVFVPRNDEMVFVCGTNAFNPMCRYYRLSTLEYDGEEISGLARCPFDARQTNVALFADGKLYSATVADFLASDAVIYRSMGDGSALRTIKYDSKWIKEPHFLHAIEYGNYVYFFFREIAVEHNNLGKAVYSRVARICKNDMGGSQRVLEKHWTSFLKARLNCSVPGDSFFYFDVLQSITDIIQINGIPTVVGVFTTQLNSIPGSAVCAFSMDDIEKVFKGRFKEQKTPDSVWTAVPEDKVPKPRPGCCAKHGLAEAYKTSIDFPDETLSFIKSHPLMDSAVPPIADEPWFTKTRVRYRLTAISVDHSAGPYQNYTVIFVGSEAGMVLKVLAKTSPFSLNDSVLLEEIEAYNHAKCSAENEEDKKVISLQLDKDHHALYVAFSSCIIRIPLSRCERYGSCKKSCIASRDPYCGWLSQGSCGRVTPGMLAEGYEQDTEFGNTAHLGDCHEILPTSTTPDYKIFGGPTSDMEVSSSSVTTMASIPEITPKVIDTWRPKLTSSRKFVVQDDPNTSDFTDPLSGIPKGVRWEVQSGESNQMVHMN

SEQ ID NO: 2984 - protein, 925 aa, synthetic construct
  REGION 1..925: note = SEZ6 (Q53EL9) SP+PP+ECD
MRPVALLLLPSLLALLAHGLSLEAPTVGKGQAPGIEETDGELTAAPTPEQPERGVHFVTTAPTLKLLNHHPLLEEFLQEGLEKGDEELRPALPFQPDPPAPFTPSPLPRLANQDSRPVFTSPTPAMAAVPTQPQSKEGPWSPESESPMLRITAPLPPGPSMAVPTLGPGEIASTTPPSRAWTPTQEGPGDMGRPWVAEVVSQGAGIGIQGTITSSTASGDDEETTTTTTIITTTITTVQTPGPCSWNFSGPEGSLDSPTDLSSPTDVGLDCFFYISVYPGYGVEIKVQNISLREGETVTVEGLGGPDPLPLANQSFLLRGQVIRSPTHQAALRFQSLPPPAGPGTFHFHYQAYLLSCHFPRRPAYGDVTVTSLHPGGSARFHCATGYQLKGARHLTCLNATQPFWDSKEPVCIAACGGVIRNATTGRIVSPGFPGNYSNNLTCHWLLEAPEGQRLHLHFEKVSLAEDDDRLIIRNGDNVEAPPVYDSYEVEYLPIEGLLSSGKHFFVELSTDSSGAAAGMALRYEAFQQGHCYEPFVKYGNFSSSTPTYPVGTTVEFSCDPGYTLEQGSIIIECVDPHDPQWNETEPACRAVCSGEITDSAGVVLSPNWPEPYGRGQDCIWGVHVEEDKRIMLDIRVLRIGPGDVLTFYDGDDLTARVLGQYSGPRSHFKLFTSMADVTIQFQSDPGTSVLGYQQGFVIHFFEVPRNDTCPELPEIPNGWKSPSQPELVHGTVVTYQCYPGYQVVGSSVLMCQWDLTWSEDLPSCQRVTSCHDPGDVEHSRRLISSPKFPVGATVQYICDQGFVLMGSSILTCHDRQAGSPKWSDRAPKCLLEQLKPCHGLSAPENGARSPEKQLHPAGATIHFSCAPGYVLKGQASIKCVPGHPSHWSDPPPICRAASLDGFYNSRSLDVAKAPAASSTLDAAH

SEQ ID NO: 2985 - protein, 844 aa, synthetic construct
  REGION 1..844: note = SEZ6L2 (Q6UXD5) SP+PP+ECD
MGTPRAQHPPPPQLLFLILLSCPWIQGLPLKEEEILPEPGSETPTVASEALAELLHGALLRRGPEMGYLPGSDRDPTLATPPAGQTLAVPSLPRATEPGTGPLTTAVTPNGVRGAGPTAPELLTPPPGTTAPPPPSPASPGPPLGPEGGEEETTTTIITTTTVTTTVTSPVLCNNNISEGEGYVESPDLGSPVSRTLGLLDCTYSIHVYPGYGIEIQVQTLNLSQEEELLVLAGGGSPGLAPRLLANSSMLGEGQVLRSPTNRLLLHFQSPRVPRGGGFRIHYQAYLLSCGFPPRPAHGDVSVTDLHPGGTATFHCDSGYQLQGEETLICLNGTRPSWNGETPSCMASCGGTIHNATLGRIVSPEPGGAVGPNLTCRWVIEAAEGRRLHLHFERVSLDEDNDRLMVRSGGSPLSPVIYDSDMDDVPERGLISDAQSLYVELLSETPANPLLLSLRFEAFEEDRCFAPFLAHGNVTTTDPEYRPGALATFSCLPGYALEPPGPPNAIECVDPTEPHWNDTEPACKAMCGGELSEPAGVVLSPDWPQSYSPGQDCVWGVHVQEEKRILLQVEILNVREGDMLTLFDGDGPSARVLAQLRGPQPRRRLLSSGPDLTLQFQAPPGPPNPGLGQGFVLHFKEVPRNDTCPELPPPEWGWRTASHGDLIRGTVLTYQCEPGYELLGSDILTCQWDLSWSAAPPACQKIMTCADPGEIANGHRTASDAGFPVGSHVQYRCLPGYSLEGAAMLTCYSRDTGTPKWSDRVPKCALKYEPCLNPGVPENGYQTLYKHHYQAGESLRFFCYEGFELIGEVTITCVPGHPSQWTSQPPLCKVTQTTDPSRQLEGGN

SEQ ID NO: 2986 - protein, 290 aa, synthetic construct
  REGION 1..290: note = SGCA (Q16586) SP+PP+ECD
MAETLFWTPLLVVLLAGLGDTEAQQTTLHPLVGRVFVHTLDHETFLSLPEHVAVPPAVHITYHAHLQGHPDLPRWLRYTQRSPHHPGFLYGSATPEDRGLQVIEVTAYNRDSFDTTRQRLVLEIGDPEGPLLPYQAEFLVRSHDAEEVLPSTPASRFLSALGGLWEPGELQLLNVTSALDRGGRVPLPIEGRKEGVYIKVGSASPFSTCLKMVASPDSHARCAQGQPPLLSCYDTLAPHFRVDWCNVTLVDKSVPEPADEVPTPGDGILEHDPFFCPPTEAPDRDFLVDA

SEQ ID NO: 2987 - protein, 87 aa, synthetic construct
  REGION 1..87: note = SHISA4 (Q96DD7) SP+PP+ECD
MPPAGLRRAAPLTAIALLVLGAPLVLAGEDCLWYLDRNGSWHPGFNCEFFTFCCGTCYHRYCCRDLTLLITERQQKHCLAFSPKTIA

SEQ ID NO: 2988 - protein, 174 aa, synthetic construct
  REGION 1..174: note = SHISA6 (Q6ZSJ9) SP+PP+ECD
MALRRLLLLLLLSLESLDLLPSVHGARGRAANRTLSAGGAAVGGRRAGGALARGGRELNGTARAPGIPEAGSRRGQPAAAVAAAASAAVTYETCWGYYDVSGQYDKEFECNNSESGYLYCCGTCYYRFCCKKRHEKLDQRQCTNYQSPVWVQTPSTKVVSPGPENKYDPEKDKT

SEQ ID NO: 2989 - protein, 186 aa, synthetic construct
  REGION 1..186: note = SHISA7 (A6NL88) SP+PP+ECD
MPALLLLVLLASSAGQARARPSNATSAEPAGPLPALLAHLRRLTGALTGGGGAASPGANGTRTGPAGGAGAAARAPPPAELCHGYYDVMGQYDATFNCSTGSYRFCCGTCHYRFCCEHRHMRLAQASCSNYDTPRWATTPPPLAGGAGGAGGAGGGPGPGQAGWLEGGRTGGAGGRGGEGPGGSTA

SEQ ID NO: 2990 - protein, 138 aa, synthetic construct
  REGION 1..138: note = SHISA8 (B8ZZ34) SP+PP+ECD
MARAGARGLLGGRRPPGLRLALALRLALLLARPPSGRAGAPEAQGPAAPGTTAPEGGDRCRGYYDVMGQWDPPFNCSSGAYSFCCGTCGYRFCCHDGPRRLDQSRCSNYDTPAWVQTGRPPARARDTAAPRDPGRERS

SEQ ID NO: 2991 - protein, 149 aa, synthetic construct
  REGION 1..149: note = SHISA9 (B4DS77) SP+PP+ECD
MRRVLRLLLGCFLTELCARVCRAQERAGHGQLAQLGGVLLLAGGNRSGAASGEASEGAEASDAPPTRAPTPDFCRGYFDVMGQWDPPFNCSSGDFIFCCGTCGFRFCCTFKKRRLNQSTCTNYDTPLWLNTGKPPARKDDPLHDPTKDK

SEQ ID NO: 2992 - protein, 1641 aa, synthetic construct
  REGION 1..1641: note = SIGLEC1 (Q9BZZ2) SP+PP+ECD
MGFLPKLLLLASFFPAGQASWGVSSPQDVQGVKGSCLLIPCIFSFPADVEVPDGITAIWYYDYSGQRQVVSHSADPKLVEARFRGRTEFMGNPEHRVCNLLLKDLQPEDSGSYNFRFEISEVNRWSDVKGTLVTVTEEPRVPTIASPVELLEGTEVDFNCSTPYVCLQEQVRLQWQGQDPARSVTFNSQKFEPTGVGHLETLHMAMSWQDHGRILRCQLSVANHRAQSEIHLQVKYAPKGVKILLSPSGRNILPGELVTLTCQVNSSYPAVSSIKWLKDGVRLQTKTGVLHLPQAAWSDAGVYTCQAENGVGSLVSPPISLHIFMAEVQVSPAGPILENQTVTLVCNTPNEAPSDLRYSWYKNHVLLEDAHSHTLRLHLATRADTGFYFCEVQNVHGSERSGPVSVVVNHPPLTPVLTAFLETQAGLVGILHCSVVSEPLATLVLSHGGHILASTSGDSDHSPRFSGTSGPNSLRLEIRDLEETDSGEYKCSATNSLGNATSTLDFHANAARLLISPAAEVVEGQAVTLSCRSGLSPTPDARFSWYLNGALLHEGPGSSLLLPAASSTDAGSYHCRARDGHSASGPSSPAVLTVLYPPRQPTFTTRLDLDAAGAGAGRRGLLLCRVDSDPPARLQLLHKDRVVATSLPSGGGCSTCGGCSPRMKVTKAPNLLRVEIHNPLLEEEGLYLCEASNALGNASTSATFNGQATVLAIAPSHTLQEGTEANLTCNVSREAAGSPANFSWFRNGVLWAQGPLETVTLLPVARTDAALYACRILTEAGAQLSTPVLLSVLYPPDRPKLSALLDMGQGHMALFICTVDSRPLALLALFHGEHLLATSLGPQVPSHGRFQAKAEANSLKLEVRELGLGDSGSYRCEATNVLGSSNTSLFFQVRGAWVQVSPSPELQEGQAVVLSCQVHTGVPEGTSYRWYRDGQPLQESTSATLRFAAITLTQAGAYHCQAQAPGSATTSLAAPISLHVSYAPRHVTLTTLMDTGPGRLGLLLCRVDSDPPAQLRLLHGDRLVASTLQGVGGPEGSSPRLHVAVAPNTLRLEIHGAMLEDEGVYICEASNTLGQASASADFDAQAVNVQVWPGATVREGQLVNLTCLVWTTHPAQLTYTWYQDGQQRLDAHSIPLPNVTVRDATSYRCGVGPPGRAPRLSRPITLDVLYAPRNLRLTYLLESHGGQLALVLCTVDSRPPAQLALSHAGRLLASSTAASVPNTLRLELRGPQPRDEGFYSCSARSPLGQANTSLELRLEGVRVILAPEAAVPEGAPITVTCADPAAHAPTLYTWYHNGRWLQEGPAASLSFLVATRAHAGAYSCQAQDAQGTRSSRPAALQVLYAPQDAVLSSFRDSRARSMAVIQCTVDSEPPAELALSHDGKVLATSSGVHSLASGTGHVQVARNALRLQVQDVPAGDDTYVCTAQNLLGSISTIGRLQVEGARVVAEPGLDVPEGAALNLSCRLLGGPGPVGNSTFAWFWNDRRLHAEPVPTLAFTHVARAQAGMYHCLAELPTGAAASAPVMLRVLYPPKTPTMMVFVEPEGGLRGILDCRVDSEPLASLTLHLGSRLVASSQPQGAPAEPHIHVLASPNALRVDIEALRPSDQGEYICSASNVLGSASTSTYFGVRALHRLHQFQQ

SEQ ID NO: 2993 - protein, 550 aa, synthetic construct
  REGION 1..550: note = SIGLEC10 (Q96LC7) SP+PP+ECD
MLLPLLLSSLLGGSQAMDGRFWIRVQESVMVPEGLCISVPCSFSYPRQDWTGSTPAYGYWFKAVTETTKGAPVATNHQSREVEMSTRGRFQLTGDPAKGNCSLVIRDAQMQDESQYFFRVERGSYVRYNFMNDGFFLKVTALTQKPDVYIPETLEPGQPVTVICVFNWAFEECPPPSFSWTGAALSSQGTKPTTSHFSVLSFTPRPQDHNTDLTCHVDFSRKGVSAQRTVRLRVAYAPRDLVISISRDNTPALEPQPQGNVPYLEAQKGQFLRLLCAADSQPPATLSWVLQNRVLSSSHPWGPRPLGLELPGVKAGDSGRYTCRAENRLGSQQRALDLSVQYPPENLRVMVSQANRTVLENLGNGTSLPVLEGQSLCLVCVTHSSPPARLSWTQRGQVLSPSQPSDPGVLELPRVQVEHEGEFTCHARHPLGSQHVSLSLSVHYSPKLLGPSCSWEAEGLHCSCSSQASPAPSLRWWLGEELLEGNSSQDSFEVTPSSAGPWANSSLSLHGGLSSGLRLRCEAWNVHGAQSGSILQLPDKKGLISTAFSN

SEQ ID NO: 2994 - protein, 561 aa, synthetic construct
  REGION 1..561: note = SIGLEC11 (Q96RL6) SP+PP+ECD
MVPGQAQPQSPEMLLLPLLLPVLGAGSLNKDPSYSLQVQRQVPVPEGLCVIVSCNLSYPRDGWDESTAAYGYWFKGRTSPKTGAPVATNNQSREVEMSTRDRFQLTGDPGKGSCSLVIRDAQREDEAWYFFRVERGSRVRHSFLSNAFFLKVTALTKKPDVYIPETLEPGQPVTVICVFNWAFKKCPAPSFSWTGAALSPRRTRPSTSHFSVLSFTPSPQDHDTDLTCHVDFSRKGVSAQRTVRLRVAYAPKDLIISISHDNTSALELQGNVIYLEVQKGQFLRLLCAADSQPPATLSWVLQDRVLSSSHPWGPRTLGLELRGVRAGDSGRYTCRAENRLGSQQQALDLSVQYPPENLRVMVSQANRTVLENLGNGTSLPVLEGQSLRLVCVTHSSPPARLSWTRWGQTVGPSQPSDPGVLELPPIQMEHEGEFTCHAQHPLGSQHVSLSLSVHYPPQLLGPSCSWEAEGLHCSCSSQASPAPSLRWWLGEELLEGNSSQGSFEVTPSSAGPWANSSLSLHGGLSSGLRLRCKAWNVHGAQSGSVFQLLPGKLEHGGGLGL

SEQ ID NO: 2995 - protein, 481 aa, synthetic construct
  REGION 1..481: note = SIGLEC12 (Q96PQ1) SP+PP+ECD
MLLLLLLLPPLLCGRVGAKEQKDYLLTMQKSVTVQEGLCVSVLCSFSYPQNGWTASDPVHGYWFRAGDHVSRNIPVATNNPARAVQEETRDRFHLLGDPQNKDCTLSIRDTRESDAGTYVFCVERGNMKWNYKYDQLSVNVTASQDLLSRYRLEVPESVTVQEGLCVSVPCSVLYPHYNWTASSPVYGSWFKEGADIPWDIPVATNTPSGKVQEDTHGRFLLLGDPQTNNCSLSIRDARKGDSGKYYFQVERGSRKWNYIYDKLSVHVTALTHMPTFSIPGTLESGHPRNLTCSVPWACEQGTPPTITWMGASVSSLDPTITRSSMLSLIPQPQDHGTSLTCQVTLPGAGVTMTRAVRLNISYPPQNLTMTVFQGDGTASTTLRNGSALSVLEGQSLHLVCAVDSNPPARLSWTWGSLTLSPSQSSNLGVLELPRVHVKDEGEFTCRAQNPLGSQHISLSLSLQNEYTGKMRPISGVTLGA

SEQ ID NO: 2996 - protein, 358 aa, synthetic construct
  REGION 1..358: note = SIGLEC14 (Q08ET2) SP+PP+ECD
MLPLLLLPLLWGGSLQEKPVYELQVQKSVTVQEGLCVLVPCSFSYPWRSWYSSPPLYVYWFRDGEIPYYAEVVATNNPDRRVKPETQGRFRLLGDVQKKNCSLSIGDARMEDTGSYFFRVERGRDVKYSYQQNKLNLEVTALIEKPDIHFLEPLESGRPTRLSCSLPGSCEAGPPLTFSWTGNALSPLDPETTRSSELTLTPRPEDHGTNLTCQVKRQGAQVTTERTVQLNVSYAPQNLAISIFFRNGTGTALRILSNGMSVPIQEGQSLFLACTVDSNPPASLSWFREGKALNPSQTSMSGTLELPNIGAREGGEFTCRVQHPLGSQHLSFILSVQRSSSSCICVTEKQQGSWPLVL

SEQ ID NO: 2997 - protein, 263 aa, synthetic construct
  REGION 1..263: note = SIGLEC15 (Q6ZMC9) SP+PP+ECD
MEKSIWLLACLAWVLPTGSFVRTKIDTTENLLNTEVHSSPAQRWSMQVPPEVSAEAGDAAVLPCTFTHPHRHYDGPLTAIWRAGEPYAGPQVFRCAAARGSELCQTALSLHGRFRLLGNPRRNDLSLRVERLALADDRRYFCRVEFAGDVHDRYESRHGVRLHVTAAPRIVNISVLPSPAHAFRALCTAEGEPPPALAWSGPALGNSLAAVRSPREGHGHLVTAELPALTHDGRYTCTAANSLGRSEASVYLFRFHGASGAST

SEQ ID NO: 2998 - protein, 434 aa, synthetic construct
  REGION 1..434: note = SIGLEC16 (A6NMB1) SP+PP+ECD
MLLLPLLLPVLGAGSLNKDPSYSLQVQRQVPVPEGLCVIVSCNLSYPRDGWDESTAAYGYWFKGRTSPKTGAPVATNNQSREVAMSTRDRFQLTGDPGKGSCSLVIRDAQREDEAWYFFRVERGSRVRHSFLSNAFFLKVTALTQKPDVYIPETLEPGQPVTVICVFNWAFKKCPAPSFSWTGAALSPRRTRPSTSHFSVLSFTPSPQDHDTDLTCHVDFSRKGVSAQRTVRLRVASLELQGNVIYLEVQKGQFLRLLCAADSQPPATLSWVLQDRVLSSSHPWGPRTLGLELPGVKAGDSGRYTCRAENRLGSQQRALDLSVQYPPENLRVMVSQANRTVLENLRNGTSLRVLEGQSLRLVCVTHSSPPARLSWTWGEQTVGPSQPSDPGVLQLPRVQMEHEGEFTCHARHPLGSQRVSLSFSVHCKSGPMTG

SEQ ID NO: 2999 - protein, 441 aa, synthetic construct
  REGION 1..441: note = SIGLEC5 (O15389) SP+PP+ECD
MLPLLLLPLLWGGSLQEKPVYELQVQKSVTVQEGLCVLVPCSFSYPWRSWYSSPPLYVYWFRDGEIPYYAEVVATNNPDRRVKPETQGRFRLLGDVQKKNCSLSIGDARMEDTGSYFFRVERGRDVKYSYQQNKLNLEVTALIEKPDIHFLEPLESGRPTRLSCSLPGSCEAGPPLTFSWTGNALSPLDPETTRSSELTLTPRPEDHGTNLTCQMKRQGAQVTTERTVQLNVSYAPQTITIFRNGIALEILQNTSYLPVLEGQALRLLCDAPSNPPAHLSWFQGSPALNATPISNTGILELRRVRSAEEGGFTCRAQHPLGFLQIFLNLSVYSLPQLLGPSCSWEAEGLHCRCSFRARPAPSLCWRLEEKPLEGNSSQGSFKVNSSSAGPWANSSLILHGGLSSDLKVSCKAWNIYGSQSGSVLLLQGRSNLGTGVVPAAL

SEQ ID NO: 3000 - protein, 347 aa, synthetic construct
  REGION 1..347: note = SIGLEC6 (O43699) SP+PP+ECD
MQGAQEASASEMLPLLLPLLWAGALAQERRFQLEGPESLTVQEGLCVLVPCRLPTTLPASYYGYGYWFLEGADVPVATNDPDEEVQEETRGRFHLLWDPRRKNCSLSIRDARRRDNAAYFFRLKSKWMKYGYTSSKLSVRVMALTHRPNISIPGTLESGHPSNLTCSVPWVCEQGTPPIFSWMSAAPTSLGPRTTQSSVLTITPRPQDHSTNLTCQVTFPGAGVTMERTIQLNVSYAPQKVAISIFQGNSAAFKILQNTSSLPVLEGQALRLLCDADGNPPAHLSWFQGFPALNATPISNTGVLELPQVGSAEEGDFTCRAQHPLGSLQISLSLFVHWKPEGRAGGV

SEQ ID NO: 3001 - protein, 353 aa, synthetic construct
  REGION 1..353: note = SIGLEC7 (Q9Y286) SP+PP+ECD
MLLLLLLPLLWGRERVEGQKSNRKDYSLTMQSSVTVQEGMCVHVRCSFSYPVDSQTDSDPVHGYWFRAGNDISWKAPVATNNPAWAVQEETRDRFHLLGDPQTKNCTLSIRDARMSDAGRYFFRMEKGNIKWNYKYDQLSVNVTALTHRPNILIPGTLESGCFQNLTCSVPWACEQGTPPMISWMGTSVSPLHPSTTRSSVLTLIPQPQHHGTSLTCQVTLPGAGVTTNRTIQLNVSYPPQNLTVTVFQGEGTASTALGNSSSLSVLEGQSLRLVCAVDSNPPARLSWTWRSLTLYPSQPSNPLVLELQVHLGDEGEFTCRAQNSLGSQHVSLNLSLQQEYTGKMRPVSGVLL

SEQ ID NO: 3002 - protein, 363 aa, synthetic construct
  REGION 1..363: note = SIGLEC8 (Q9NYZ4) SP+PP+ECD
MLLLLLLLPLLWGTKGMEGDRQYGDGYLLQVQELVTVQEGLCVHVPCSFSYPQDGWTDSDPVHGYWFRAGDRPYQDAPVATNNPDREVQAETQGRFQLLGDIWSNDCSLSIRDARKRDKGSYFFRLERGSMKWSYKSQLNYKTKQLSVFVTALTHRPDILILGTLESGHSRNLTCSVPWACKQGTPPMISWIGASVSSPGPTTARSSVLTLTPKPQDHGTSLTCQVTLPGTGVTTTSTVRLDVSYPPWNLTMTVFQGDATASTALGNGSSLSVLEGQSLRLVCAVNSNPPARLSWTRGSLTLCPSRSSNPGLLELPRVHVRDEGEFTCRAQNAQGSQHISLSLSLQNEGTGTSRPVSQVTLAA

SEQ ID NO: 3003 - protein, 348 aa, synthetic construct
  REGION 1..348: note = SIGLEC9 (Q9Y336) SP+PP+ECD
MLLLLLPLLWGRERAEGQTSKLLTMQSSVTVQEGLCVHVPCSFSYPSHGWIYPGPVVHGYWFREGANTDQDAPVATNNPARAVWEETRDRFHLLGDPHTKNCTLSIRDARRSDAGRYFFRMEKGSIKWNYKHHRLSVNVTALTHRPNILIPGTLESGCPQNLTCSVPWACEQGTPPMISWIGTSVSPLDPSTTRSSVLTLIPQPQDHGTSLTCQVTFPGASVTTNKTVHLNVSYPPQNLTMTVFQGDGTVSTVLGNGSSLSLPEGQSLRLVCAVDAVDSNPPARLSLSWRGLTLCPSQPSNPGVLELPWVHLRDAAEFTCRAQNPLGSQQVYLNVSLQSKATSGVTQG

SEQ ID NO: 3004 - protein, 373 aa, synthetic construct
  REGION 1..373: note = SIRPA (P78324) SP+PP+ECD
MEPAGPAPGRLGPLLCLLLAASCAWSGVAGEEELQVIQPDKSVLVAAGETATLRCTATSLIPVGPIQWFRGAGPGRELIYNQKEGHFPRVTTVSDLTKRNNMDFSIRIGNITPADAGTYYCVKFRKGSPDDVEFKSGAGTELSVRAKPSAPVVSGPAARATPQHTVSFTCESHGFSPRDITLKWFKNGNELSDFQTNVDPVGESVSYSIHSTAKVVLTREDVHSQVICEVAHVTLQGDPLRGTANLSETIRVPPTLEVTQQPVRAENQVNVTCQVRKFYPQRLQLTWLENGNVSRTETASTVTENKDGTYNWMSWLLVNVSAHRDDVKLTCQVEHDGQPAVSKSHDLKVSAHPKEQGSNTAAENTGSNERNIY

SEQ ID NO: 3005 - protein, 371 aa, synthetic construct
  REGION 1..371: note = SIRPB1 (O00241) SP+PP+ECD
MPVPASWPHLPSPFLLMTLLLGRLTGVAGEDELQVIQPEKSVSVAAGESATLRCAMTSLIPVGPIMWFRGAGAGRELIYNQKEGHFPRVTTVSELTKRNNLDFSISISNITPADAGTYYCVKFRKGSPDDVEFKSGAGTELSVRAKPSAPVVSGPAVRATPEHTVSFTCESHGFSPRDITLKWFKNGNELSDFQTNVDPAGDSVSYSIHSTARVVLTRGDVHSQVICEIAHITLQGDPLRGTANLSEAIRVPPTLEVTQQPMRAENQANVTCQVSNFYPRGLQLTWLENGNVSRTETASTLIENKDGTYNWMSWLLVNTCAHRDDVVLTCQVEHDGQQAVSKSYALEISAHQKEHGSDITHEAALAPTAPL

SEQ ID NO: 3006 - protein, 371 aa, synthetic construct; identical to SEQ ID NO: 3005
  REGION 1..371: note = SIRPB1 (Q5TFQ8) SP+PP+ECD

SEQ ID NO: 3007 - protein, 287 aa, synthetic construct
  REGION 1..287: note = SIRPB2 (Q5JXA9) SP+PP+ECD
MCSTMSAPTCLAHLPPCFLLLALVLVPSDASGQSSRNDWQVLQPEGPMLVAEGETLLLRCMVVGSCTDGMIKWVKVSTQDQQEIYNFKRGSFPGVMPMIQRTSEPLNCDYSIYIHNVTREHTGTYHCVRFDGLSEHSEMKSDEGTSVLVKGAGDPEPDLWIIQPQELVLGTTGDTVFLNCTVLGDGPPGPIRWFQGAGLSREAIYNFGGISHPKETAVQASNNDFSILLQNVSSEDAGTYYCVKFQRKPNRQYLSGQGTSLKVKAKSTSSKEAEFTSEPATEMSPTG

SEQ ID NO: 3008 - protein, 360 aa, synthetic construct
  REGION 1..360: note = SIRPG (Q9P1W8) SP+PP+ECD
MPVPASWPHPPGPFLLLTLLLGLTEVAGEEELQMIQPEKLLLVTVGKTATLHCTVTSLLPVGPVLWFRGVGPGRELIYNQKEGHFPRVTTVSDLTKRNNMDFSIRISSITPADVGTYYCVKFRKGSPENVEFKSGPGTEMALGAKPSAPVVLGPAARTTPEHTVSFTCESHGFSPRDITLKWFKNGNELSDFQTNVDPTGQSVAYSIRSTARVVLDPWDVRSQVICEVAHVTLQGDPLRGTANLSEAIRVPPTLEVTQQPMRVGNQVNVTCQVRKFYPQSLQLTWSENGNVCQRETASTLTENKDGTYNWTSWFLVNISDQRDDVVLTCQVKHDGQLAVSKRLALEVTVHQKDQSSDATP

SEQ ID NO: 3009 - protein, 40 aa, synthetic construct
  REGION 1..40: note = SIT1 (Q9Y3P8) SP+PP+ECD
MNQADPRLRAVCLWTLTSAAMSRGDNCTDLLALGIPSITQ

SEQ ID NO: 3010 - protein, 237 aa, synthetic construct
  REGION 1..237: note = SLAMF1 (Q13291) SP+PP+ECD
MDPKGLLSLTFVLFLSLAFGASYGTGGRMMNCPKILRQLGSKVLLPLTYERINKSMNKSIHIVVTMAKSLENSVENKIVSLDPSEAGPPRYLGDRYKFYLENLTLGIRESRKEDEGWYLMTLEKNVSVQRFCLQLRLYEQVSTPEIKVLNKTQENGTCTLILGCTVEKGDHVAYSWSEKAGTHPLNPANSSHLLSLTLGPQHADNIYICTVSNPISNNSQTFSPWPGCRTDPSETKP

SEQ ID NO: 3011 - protein, 226 aa, synthetic construct
  REGION 1..226: note = SLAMF6 (Q96DU3) SP+PP+ECD
MLWLFQSLLFVFCFGPGNVVSQSSLTPLMVNGILGESVTLPLEFPAGEKVNFITWLFNETSLAFIVPHETKSPEIHVTNPKQGKRLNFTQSYSLQLSNLKMEDTGSYRAQISTKTSAKLSSYTLRILRQLRNIQVTNHSQLFQNMTCELHLTCSVEDADDNVSFRWEALGNTLSSQPNLTVSWDPRISSEQDYTCIAENAVSNLSFSVSAQKLCEDVKIQYTDTKM

SEQ ID NO: 3012 - protein, 226 aa, synthetic construct
  REGION 1..226: note = SLAMF7 (Q9NQ25) SP+PP+ECD
MAGSPTCLTLIYILWQLTGSAASGPVKELVGSVGGAVTFPLKSKVKQVDSIVWTFNTTPLVTIQPEGGTIIVTQNRNRERVDFPDGGYSLKLSKLKKNDSGIYYVGIYSSSLQQPSTQEYVLHVYEHLSKPKVTMGLQSNKNGTCVTNLTCCMEHGEEDVIYTWKALGQAANESHNGSILPISWRWGESDMTFICVARNPVSRNFSSPILARKLCEGAADDPDSSM

SEQ ID NO: 3013 - protein, 233 aa, synthetic construct
  REGION 1..233: note = SLAMF8 (Q9P0V8) SP+PP+ECD
MVMRPLWSLLLWEALLPITVTGAQVLSKVGGSVLLVAARPPGFQVREAIWRSLWPSEELLATFFRGSLETLYHSRFLGRAQLHSNLSLELGPLESGDSGNFSVLMVDTRGQPWTQTLQLKVYDAVPRPVVQVFIAVERDAQPSKTCQVFLSCWAPNISEITYSWRRETTMDFGMEPHSLFTDGQVLSISLGPGDRDVAYSCIVSNPVSWDLATVTPWDSCHHEAAPGKASYKD

SEQ ID NO: 3014 - protein, 236 aa, synthetic construct
  REGION 1..236: note = SLAMF9 (Q96A28) SP+PP+ECD
MCAFPWLLLLLLLQEGSQRRLWRWCGSEEVVAVLQESISLPLEIPPDEEVENIIWSSHKSLATVVPGKEGHPATIMVTNPHYQGQVSFLDPSYSLHISNLSWEDSGLYQAQVNLRTSQISTMQQYNICVYRWLSEPQITVNFESSGEGACSMSLVCSVEKAGMDMTYSWLSRGDSTYTFHEGPVLSTSWRPGDSALSYTCRANNPISNVSSCPIPDGPFYADPNYASEKPSTAFCL

SEQ ID NO: 3015 - protein, 622 aa, synthetic construct
  REGION 1..622: note = SLITRK1 (Q96PX8) SP+PP+ECD
MLLWILLLETSLCFAAGNVTGDVCKEKICSCNEIEGDLHVDCEKKGFTSLQRFTAPTSQFYHLFLHGNSLTRLFPNEFANFYNAVSLHMENNGLHEIVPGAFLGLQLVKRLHINNNKIKSFRKQTFLGLDDLEYLQADFNLLRDIDPGAFQDLNKLEVLILNDNLISTLPANVFQYVPITHLDLRGNRLKTLPYEEVLEQIPGIAEILLEDNPWDCTCDLLSLKEWLENIPKNALIGRVVCEAPTRLQGKDLNETTEQDLCPLKNRVDSSLPAPPAQEETFAPGPLPTPFKTNGQEDHATPGSAPNGGTKIPGNWQIKIRPTAAIATGSSRNKPLANSLPCPGGCSCDHIPGSGLKMNCNNRNVSSLADLKPKLSNVQELFLRDNKIHSIRKSHFVDYKNLILLDLGNNNIATVENNTFKNLLDLRWLYMDSNYLDTLSREKFAGLQNLEYLNVEYNAIQLILPGTFNAMPKLRILILNNNLLRSLPVDVFAGVSLSKLSLHNNYFMYLPVAGVLDQLTSIIQIDLHGNPWECSCTIVPFKQWAERLGSEVLMSDLKCETPVNFFRKDFMLLSNDEICPQLYARISPTLTSHSKNSTGLAETGTHSNSYLDTSRVSISVLVP

SEQ ID NO: 3016 - protein, 621 aa, synthetic construct
  REGION 1..621: note = SLITRK2 (Q9H156) SP+PP+ECD
MLSGVWFLSVLTVAGILQTESRKTAKDICKIRCLCEEKENVLNINCENKGFTTVSLLQPPQYRIYQLFLNGNLLTRLYPNEFVNYSNAVTLHLGNNGLQEIRTGAFSGLKTLKRLHLNNNKLEILREDTFLGLESLEYLQADYNYISAIEAGAFSKLNKLKVLILNDNLLLSLPSNVFRFVLLTHLDLRGNRLKVMPFAGVLEHIGGIMEIQLEENPWNCTCDLLPLKAWLDTITVFVGEIVCETPFRLHGKDVTQLTRQDLCPRKSASDSSQRGSHADTHVQRLSPTMNPALNPTRAPKASRPPKMRNRPTPRVTVSKDRQSFGPIMVYQTKSPVPLTCPSSCVCTSQSSDNGLNVNCQERKFTNISDLQPKPTSPKKLYLTGNYLQTVYKNDLLEYSSLDLLHLGNNRIAVIQEGAFTNLTSLRRLYLNGNYLEVLYPSMFDGLQSLQYLYLEYNVIKEIKPLTFDALINLQLLFLNNNLLRSLPDNIFGGTALTRLNLRNNHFSHLPVKGVLDQLPAFIQIDLQENPWDCTCDIMGLKDWTEHANSPVIINEVTCESPAKHAGEILKFLGREAICPDSPNLSDGTVLSMNHNTDTPRSLSVSPSSYPELHTEVPLSVL

SEQ ID NO: 3017 - protein, 618 aa, synthetic construct
  REGION 1..618: note = SLITRK4 (Q8IW52) SP+PP+ECD
MFLWLFLILSALISSTNADSDISVEICNVCSCVSVENVLYVNCEKVSVYRPNQLKPPWSNFYHLNFQNNFLNILYPNTFLNFSHAVSLHLGNNKLQNIEGGAFLGLSALKQLHLNNNELKILRADTFLGIENLEYLQADYNLIKYIERGAFNKLHKLKVLILNDNLISFLPDNIFRFASLTHLDIRGNRIQKLPYIGVLEHIGRVVELQLEDNPWNCSCDLLPLKAWLENMPYNIYIGEAICETPSDLYGRLLKETNKQELCPMGTGSDFDVRILPPSQLENGYTTPNGHTTQTSLHRLVTKPPKTTNPSKISGIVAGKALSNRNLSQIVSYQTRVPPLTPCPAPCFCKTHPSDLGLSVNCQEKNIQSMSELIPKPLNAKKLHVNGNSIKDVDVSDFTDFEGLDLLHLGSNQITVIKGDVFHNLTNLRRLYLNGNQIERLYPEIFSGLHNLQYLYLEYNLIKEISAGTFDSMPNLQLLYLNNNLLKSLPVYIFSGAPLARLNLRNNKFMYLPVSGVLDQLQSLTQIDLEGNPWDCTCDLVALKLWVEKLSDGIVVKELKCETPVQFANIELKSLKNEILCPKLLNKPSAPFTSPAPAITFTTPLGPIRSPPGGPVPLS

SEQ ID NO: 3018 - protein, 664 aa, synthetic construct
  REGION 1..664: note = SLITRK5 (O94991) SP+PP+ECD
MHTCCPPVTLEQDLHRKMHSWMLQTLAFAVTSLVLSCAETIDYYGEICDNACPCEEKDGILTVSCENRGIISLSEISPPRFPIYHLLLSGNLLNRLYPNEFVNYTGASILHLGSNVIQDIETGAFHGLRGLRRLHLNNNKLELLRDDTFLGLENLEYLQVDYNYISVIEPNAFGKLHLLQVLILNDNLLSSLPNNLFRFVPLTHLDLRGNRLKLLPYVGLLQHMDKVVELQLEENPWNCSCELISLKDWLDSISYSALVGDVVCETPFRLHGRDLDEVSKQELCPRRLISDYEMRPQTPLSTTGYLHTTPASVNSVATSSSAVYKPPLKPPKGTRQPNKPRVRPTSRQPSKDLGYSNYGPSIAYQTKSPVPLECPTACSCNLQISDLGLNVNCQERKIESIAELQPKPYNPKKMYLTENYIAVVRRTDFLEATGLDLLHLGNNRISMIQDRAFGDLTNLRRLYLNGNRIERLSPELFYGLQSLQYLFLQYNLIREIQSGTFDPVPNLQLLFLNNNLLQAMPSGVFSGLTLLRLNLRSNHFTSLPVSGVLDQLKSLIQIDLHDNPWDCTCDIVGMKLWVEQLKVGVLVDEVICKAPKKFAETDMRSIKSELLCPDYSDVVVSTPTPSSIQVPARTSAVTPAVRLNSTGAPASLGAGGGASSVPLS

SEQ ID NO: 3019 - protein, 608 aa, synthetic construct
  REGION 1..608: note = SLITRK6 (Q9H5Y7) SP+PP+ECD
MKLWIHLFYSSLLACISLHSQTPVLSSRGSCDSLCNCEEKDGTMLINCEAKGIKMVSEISVPPSRPFQLSLLNNGLTMLHTNDFSGLTNAISIHLGFNNIADIEIGAFNGLGLLKQLHINHNSLEILKEDTFHGLENLEFLQADNNFITVIEPSAFSKLNRLKVLILNDNAIESLPPNIFRFVPLTHLDLRGNQLQTLPYVGFLEHIGRILDLQLEDNKWACNCDLLQLKTWLENMPPQSIIGDVVCNSPPFFKGSILSRLKKESICPTPPVYEEHEDPSGSLHLAATSSINDSRMSTKTTSILKLPTKAPGLIPYITKPSTQLPGPYCPIPCNCKVLSPSGLLIHCQERNIESLSDLRPPPQNPRKLILAGNIIHSLMKSDLVEYFTLEMLHLGNNRIEVLEEGSFMNLTRLQKLYLNGNHLTKLSKGMFLGLHNLEYLYLEYNAIKEILPGTFNPMPKLKVLYLNNNLLQVLPPHIFSGVPLTKVNLKTNQFTHLPVSNILDDLDLLTQIDLEDNPWDCSCDLVGLQQWIQKLSKNTVTDDILCTSPGHLDKKELKALNSEILCPGLVNNPSMPTQTSYLMVTTPATTTNTADTILRSLTDAVPLS

SEQ ID NO: 3020 - protein, 1099 aa, synthetic construct
  REGION 1..1099: note = SORCS1 (Q8WY21) SP+PP+ECD
MGKVGAGGGSQARLSALLAGAGLLILCAPGVCGGGSCCPSPHPSSAPRSASTPRGFSHQGRPGRAPATPLPLVVRPLFSVAPGDRALSLERARGTGASMAVAARSGRRRRSGADQEKAERGEGASRSPRGVLRDGGQQEPGTRERDPDKATRFRMEELRLTSTTFALTGDSAHNQAMVHWSGHNSSVILILTKLYDYNLGSITESSLWRSTDYGTTYEKLNDKVGLKTILSYLYVCPTNKRKIMLLTDPEIESSLLISSDEGATYQKYRLNFYIQSLLFHPKQEDWILAYSQDQKLYSSAEFGRRWQLIQEGVVPNRFYWSVMGSNKEPDLVHLEARTVDGHSHYLTCRMQNCTEANRNQPFPGYIDPDSLIVQDHYVFVQLTSGGRPHYYVSYRRNAFAQMKLPKYALPKDMHVISTDENQVFAAVQEWNQNDTYNLYISDTRGVYFTLALENVQSSRGPEGNIMIDLYEVAGIKGMFLANKKIDNQVKTFITYNKGRDWRLLQAPDTDLRGDPVHCLLPYCSLHLHLKVSENPYTSGIIASKDTAPSIIVASGNIGSELSDTDISMFVSSDAGNTWRQIFEEEHSVLYLDQGGVLVAMKHTSLPIRHLWLSFDEGRSWSKYSFTSIPLFVDGVLGEPGEETLIMTVFGHFSHRSEWQLVKVDYKSIFDRRCAEEDYRPWQLHSQGEACIMGAKRIYKKRKSERKCMQGKYAGAMESEPCVCTEADFDCDYGYERHSNGQCLPAFWFNPSSLSKDCSLGQSYLNSTGYRKVVSNNCTDGVREQYTAKPQKCPGKAPRGLRIVTADGKLTAEQGHNVTLMVQLEEGDVQRTLIQVDFGDGIAVSYVNLSSMEDGIKHVYQNVGIFRVTVQVDNSLGSDSAVLYLHVTCPLEHVHLSLPFVTTKNKEVNATAVLWPSQVGTLTYVWWYGNNTEPLITLEGSISFRFTSEGMNTITVQVSAGNAILQDTKTIAVYEEFRSLRLSFSPNLDDYNPDIPEWRRDIGRVIKKSLVEATGVPGQHILVAVLPGLPTTAELFVLPYQDPAGENKRSTDDLEQISELLIHTLNQNSVHFELKPGVRVLVHAAHLTAAPLVDLTPTHS

SEQ ID NO: 3021 - protein, 1078 aa, synthetic construct
  REGION 1..1078: note = SORCS2 (Q96PQ0) SP+PP+ECD
MAHRGPSRASKGPGPTARAPSPGAPPPPRSPRSRPLLLLLLLLGACGAAGRSPEPGRLGPHAQLTRVPRSPPAGRAEPGGGEDRQARGTEPGAPGPSPGPAPGPGEDGAPAAGYRRWERAAPLAGVASRAQVSLISTSFVLKGDATHNQAMVHWTGENSSVILILTKYYHADMGKVLESSLWRSSDFGTSYTKLTLQPGVTTVIDNFYICPTNKRKVILVSSSLSDRDQSLFLSADEGATFQKQPIPFFVETLIFHPKEEDKVLAYTKESKLYVSSDLGKKWTLLQERVTKDHVFWSVSGVDADPDLVHVEAQDLGGDFRYVTCAIHNCSEKMLTAPFAGPIDHGSLTVQDDYIFFKATSANQTKYYVSYRRNEFVLMKLPKYALPKDLQIISTDESQVFVAVQEWYQMDTYNLYQSDPRGVRYALVLQDVRSSRQAEESVLIDILEVRGVKGVFLANQKIDGKVMTLITYNKGRDWDYLRPPSMDMNGKPTNCKPPDCHLHLHLRWADNPYVSGTVHTKDTAPGLIMGAGNLGSQLVEYKEEMYITSDCGHTWRQVFEEEHHILYLDHGGVIVAIKDTSIPLKILKFSVDEGLTWSTHNFTSTSVFVDGLLSEPGDETLVMTVFGHISFRSDWELVKVDFRPSFSRQCGEEDYSSWELSNLQGDRCIMGQQRSFRKRKSTSWCIKGRSFTSALTSRVCECRDSDFLCDYGFERSSSSESSTNKCSANFWFNPLSPPDDCALGQTYTSSLGYRKVVSNVCEGGVDMQQSQVQLQCPLTPPRGLQVSIQGEAVAVRPGEDVLFVVRQEQGDVLTTKYQVDLGDGFKAMYVNLTLTGEPIRHRYESPGIYRVSVRAENTAGHDEAVLFVQVNSPLQALYLEVVPVIGLNQEVNLTAVLLPLNPNLTVFYWWIGHSLQPLLSLDNSVTTRFSDTGDVRVTVQAACGNSVLQDSRVLRVLDQFQVMPLQFSKELDAYNPNTPEWREDVGLVVTRLLSKETSVPQELLVTVVKPGLPTLADLYVLLPPPRPTRKRSLSSDKRLAAIQQVLNAQKISFLLRGGVRVLVALRDTGTGAEQLGGGG

SEQ ID NO: 3022 - protein, 1125 aa, synthetic construct
  REGION 1..1125: note = SORCS3 (Q9UPU3) SP+PP+ECD
MEAARTERPAGRPGAPLVRTGLLLLSTWVLAGAEITWDATGGPGRPAAPASRPPALSPLSPRAVASQWPEELASARRAAVLGRRAGPELLPQQGGGRGGEMQVEAGGTSPAGERRGRGIPAPAKLGGARRSRRAQPPITQERGDAWATAPADGSRGSRPLAKGSREEVKAPRAGGSAAEDLRLPSTSFALTGDSAHNQAMVHWSGHNSSVILILTKLYDFNLGSVTESSLWRSTDYGTTYEKLNDKVGLKTVLSYLYVNPTNKRKIMLLSDPEMESSILISSDEGATYQKYRLTFYIQSLLFHPKQEDWVLAYSLDQKLYSSMDFGRRWQLMHERITPNRFYWSVAGLDKEADLVHMEVRTTDGYAHYLTCRIQECAETTRSGPFARSIDISSLVVQDEYIFIQVTTSGRASYYVSYRREAFAQIKLPKYSLPKDMHIISTDENQVFAAVQEWNQNDTYNLYISDTRGIYFTLAMENIKSSRGLMGNIIIELYEVAGIKGIFLANKKVDDQVKTYITYNKGRDWRLLQAPDVDLRGSPVHCLLPFCSLHLHLQLSENPYSSGRISSKETAPGLVVATGNIGPELSYTDIGVFISSDGGNTWRQIFDEEYNVWFLDWGGALVAMKHTPLPVRHLWVSFDEGHSWDKYGFTSVPLFVDGALVEAGMETHIMTVFGHFSLRSEWQLVKVDYKSIFSRHCTKEDYQTWHLLNQGEPCVMGERKIFKKRKPGAQCALGRDHSGSVVSEPCVCANWDFECDYGYERHGESQCVPAFWYNPASPSKDCSLGQSYLNSTGYRRIVSNNCTDGLREKYTAKAQMCPGKAPRGLHVVTTDGRLVAEQGHNATFIILMEEGDLQRTNIQLDFGDGIAVSYANFSPIEDGIKHVYKSAGIFQVTAYAENNLGSDTAVLFLHVVCPVEHVHLRVPFVAIRNKEVNISAVVWPSQLGTLTYFWWFGNSTKPLITLDSSISFTFLAEGTDTITVQVAAGNALIQDTKEIAVHEYFQSQLLSFSPNLDYHNPDIPEWRKDIGNVIKRALVKVTSVPEDQILIAVFPGLPTSAELFILPPKNLTERRKGNEGDLEQIVETLFNALNQNLVQFELKPGVQVIVYVTQLTLAPLVDSSAGHSSS

SEQ ID NO: 3023 - protein, 2137 aa, synthetic construct
  REGION 1..2137: note = SORL1 (Q92673) SP+PP+ECD
MATRSSRRESRLPFLFTLVALLPPGALCEVWTQRLHGGSAPLPQDRGFLVVQGDPRELRLWARGDARGASRADEKPLRRKRSAALQPEPIKVYGQVSLNDSHNQMVVHWAGEKSNVIVALARDSLALARPKSSDVYVSYDYGKSFKKISDKLNFGLGNRSEAVIAQFYHSPADNKRYIFADAYAQYLWITFDFCNTLQGFSIPFRAADLLLHSKASNLLLGFDRSHPNKQLWKSDDFGQTWIMIQEHVKSFSWGIDPYDKPNTIYIERHEPSGYSTVFRSTDFFQSRENQEVILEEVRDFQLRDKYMFATKVVHLLGSEQQSSVQLWVSFGRKPMRAAQFVTRHPINEYYIADASEDQVFVCVSHSNNRTNLYISEAEGLKFSLSLENVLYYSPGGAGSDTLVRYFANEPFADFHRVEGLQGVYIATLINGSMNEENMRSVITFDKGGTWEFLQAPAFTGYGEKINCELSQGCSLHLAQRLSQLLNLQLRRMPILSKESAPGLIIATGSVGKNLASKTNVYISSSAGARWREALPGPHYYTWGDHGGIITAIAQGMETNELKYSTNEGETWKTFIFSEKPVFVYGLLTEPGEKSTVFTIFGSNKENVHSWLILQVNATDALGVPCTENDYKLWSPSDERGNECLLGHKTVFKRRTPHATCFNGEDFDRPVVVSNCSCTREDYECDFGFKMSEDLSLEVCVPDPEFSGKSYSPPVPCPVGSTYRRTRGYRKISGDTCSGGDVEARLEGELVPCPLAEENEFILYAVRKSIYRYDLASGATEQLPLTGLRAAVALDFDYEHNCLYWSDLALDVIQRLCLNGSTGQEVIINSGLETVEALAFEPLSQLLYWVDAGFKKIEVANPDGDFRLTIVNSSVLDRPRALVLVPQEGVMFWTDWGDLKPGIYRSNMDGSAAYHLVSEDVKWPNGISVDDQWIYWTDAYLECIERITFSGQQRSVILDNLPHPYAIAVFKNEIYWDDWSQLSIFRASKYSGSQMEILANQLTGLMDMKIFYKGKNTGSNACVPRPCSLLCLPKANNSRSCRCPEDVSSSVLPSGDLMCDCPQGYQLKNNTCVKQENTCLRNQYRCSNGNCINSIWWCDFDNDCGDMSDERNCPTTICDLDTQFRCQESGTCIPLSYKCDLEDDCGDNSDESHCEMHQCRSDEYNCSSGMCIRSSWVCDGDNDCRDWSDEANCTAIYHTCEASNFQCRNGHCIPQRWACDGDTDCQDGSDEDPVNCEKKCNGFRCPNGTCIPSSKHCDGLRDCSDGSDEQHCEPLCTHFMDFVCKNRQQCLFHSMVCDGIIQCRDGSDEDAAFAGCSQDPEFHKVCDEFGFQCQNGVCISLIWKCDGMDDCGDYSDEANCENPTEAPNCSRYFQFRCENGHCIPNRWKCDRENDCGDWSDEKDCGDSHILPFSTPGPSTCLPNYYRCSSGTCVMDTWVCDGYRDCADGSDEEACPLLANVTAASTPTQLGRCDRFEFECHQPKTCIPNWKRCDGHQDCQDGRDEANCPTHSTLTCMSREFQCEDGEACIVLSERCDGFLDCSDESDEKACSDELTVYKVQNLQWTADFSGDVTLTWMRPKKMPSASCVYNVYYRVVGESIWKTLETHSNKTNTVLKVLKPDTTYQVKVQVQCLSKAHNTNDFVTLRTPEGLPDAPRNLQLSLPREAEGVIVGHWAPPIHTHGLIREYIVEYSRSGSKMWASQRAASNFTEIKNLLVNTLYTVRVAAVTSRGIGNWSDSKSITTIKGKVIPPPDIHIDSYGENYLSFTLTMESDIKVNGYVVNLFWAFDTHKQERRTLNFRGSILSHKVGNLTAHTSYEISAWAKTDLGDSPLAFEHVMTRGVRPPAPSLKAKAINQTAVECTWTGPRNVVYGIFYATSFLDLYRNPKSLTTSLHNKTVIVSKDEQYLFLVRVVVPYQGPSSDYVVVKMIPDSRLPPRHLHVVHTGKTSVVIKWESPYDSPDQDLLYAVAVKDLIRKTDRSYKVKSRNSTVEYTLNKLEPGGKYHIIVQLGNMSKDSSIKITTVSLSAPDALKIITENDHVLLFWKSLALKEKHFNESRGYEIHMFDSAMNITAYLGNTTDNFFKISNLKMGHNYTFTVQARCLFGNQICGEPAILLYDELGSGADASATQAARSTDVA

SEQ ID NO: 3024 - protein, 755 aa, synthetic construct
  REGION 1..755: note = SORT1 (Q99523) SP+PP+ECD
MERPWGAADGLSRWPHGLGLLLLLQLLPPSTLSQDRLDAPPPPAAPLPRWSGPIGVSWGLRAAAAGGAFPRGGRWRRSAPGEDEECGRVRDFVAKLANNTHQHVFDDLRGSVSLSWVGDSTGVILVLTTFHVPLVIMTFGQSKLYRSEDYGKNFKDITDLINNTFIRTEFGMAIGPENSGKVVLTAEVSGGSRGGRIFRSSDFAKNFVQTDLPFHPLTQMMYSPQNSDYLLALSTENGLWVSKNFGGKWEEIHKAVCLAKWGSDNTIFFTTYANGSCKADLGALELWRTSDLGKSFKTIGVKIYSFGLGGRFLFASVMADKDTTRRIHVSTDQGDTWSMAQLPSVGQEQFYSILAANDDMVFMHVDEPGDTGFGTIFTSDDRGIVYSKSLDRHLYTTTGGETDFTNVTSLRGVYITSVLSEDNSIQTMITFDQGGRWTHLRKPENSECDATAKNKNECSLHIHASYSISQKLNVPMAPLSEPNAVGIVIAHGSVGDAISVMVPDVYISDDGGYSWTKMLEGPHYYTILDSGGIIVAIEHSSRPINVIKFSTDEGQCWQTYTFTRDPIYFTGLASEPGARSMNISIWGFTESFLTSQWVSYTIDFKDILERNCEEKDYTIWLAHSTDPEDYEDGCILGYKEQFLRLRKSSVCQNGRDYVVTKQPSICLCSLEDFLCDFGYYRPENDSKCVEQPELKGHDLEFCLYGREEHLTTNGYRKIPGDKCQGGVNPVREVKDLKKKCTSNFLSPEKQNSKSN

SEQ ID NO: 3025 - protein, 221 aa, synthetic construct
  REGION 1..221: note = SPACA1 (Q9HBV2) SP+PP+ECD
MSPRGTGCSAGLLMTVGWLLLAGLQSARGTNVTAAVQDAGLAHEGEGEEETENNDSETAENYAPPETEDVSNRNVVKEVEFGMCTVTCGIGVREVILTNGCPGGESKCVVRVEECRGPTDCGWGKPISESLESVRLACIHTSPLNRFKYMWKLLRQDQQSIILVNDSAILEVRKESHPLAFECDTLDNNEIVATIKFTVYTSSELQMRRSSLPATDAALIF

SEQ ID NO: 3026 - protein, 197 aa, synthetic construct
  REGION 1..197: note = SPINT2 (O43291) SP+PP+ECD
MAQLCGLRRSRAFLALLGSLLLSGVLAADRERSIHDFCLVSKVVGRCRASMPRWWYNVTDGSCQLFVYGGCDGNSNNYLTKEECLKKCATVTENATGDLATSRNAADSSVPSAPRRQDSEDHSSDMFNYEEYCTANAVTGPCRASFPRWYFDVERNSCNNFIYGGCRGNKNSYRSEEACMLRCFRQQENPPLPLGSK

SEQ ID NO: 3027 - protein, 253 aa, synthetic construct
  REGION 1..253: note = SPN (P16150) SP+PP+ECD
MATLLLLLGVLVVSPDALGSTTAVQTPTSGEPLVSTSEPLSSKMYTTSITSDPKADSTGDQTSALPPSTSINEGSPLWTSIGASTGSPLPEPTTYQEVSIKMSSVPQETPHATSHPAVPITANSLGSHTVTGGTITTNSPETSSRTSGAPVTTAASSLETSRGTSGPPLTMATVSLETSKGTSGPPVTMATDSLETSTGTTGPPVTMTTGSLEPSSGASGPQVSSVKLSTMMSPTTSTNASTVPFRNPDENSR

SEQ ID NO: 3028 - protein, 207 aa, synthetic construct
  REGION 1..207: note = SSR1 (P43307) SP+PP+ECD
MRLLPRLLLLLLLVFPATVLFRGGPRGLLAVAQDLTEDEETVEDSIIEDEDDEAEVEEDEPTDLVEDKEEEDVSGEPEASPSADTTILFVKGEDFPANNIVKFLVGFTNKGTEDFIVESLDASFRYPQDYQFYIQNFTALPLNTVVPPQRQATFEYSFIPAEPMGGRPFGLVINLNYKDLNGNVFQDAVFNQTVTVIEREDGLDGET

SEQ ID NO: 3029 - protein, 2478 aa, synthetic construct
  REGION 1..2478: note = STAB1 (Q9NY15) SP+PP+ECD
MAGPRGLLPLCLLAFCLAGFSFVRGQVLFKGCDVKTTFVTHVPCTSCAAIKKQTCPSGWLRELPDQITQDCRYEVQLGGSMVSMSGCRRKCRKQVVQKACCPGYWGSRCHECPGGAETPCNGHGTCLDGMDRNGTCVCQENFRGSACQECQDPNRFGPDCQSVCSCVHGVCNHGPRGDGSCLCFAGYTGPHCDQELPVCQELRCPQNTQCSAEAPSCRCLPGYTQQGSECRAPNPCWPSPCSLLAQCSVSPKGQAQCHCPENYHGDGMVCLPKDPCTDNLGGCPSNSTLCVYQKPGQAFCTCRPGLVSINSNASAGCFAFCSPFSCDRSATCQVTADGKTSCVCRESEVGDGRACYGHLLHEVQKATQTGRVFLQLRVAVAMMDQGCREILTTAGPFTVLVPSVSSFSSRTMNASLAQQLCRQHIIAGQHILEDTRTQQTRRWWTLAGQEITVTFNQFTKYSYKYKDQPQQTFNIYKANNIAANGVFHVVTGLRWQAPSGTPGDPKRTIGQILASTEAFSRFETILENCGLPSILDGPGPFTVFAPSNEAVDSLRDGRLIYLFTAGLSKLQELVRYHIYNHGQLTVEKLISKGRILTMANQVLAVNISEEGRILLGPEGVPLQRVDVMAANGVIHMLDGILLPPTILPILPKHCSEEQHKIVAGSCVDCQALNTSTCPPNSVKLDIFPKECVYIHDPTGLNVLKKGCASYCNQTIMEQGCCKGFFGPDCTQCPGGFSNPCYGKGNCSDGIQGNGACLCFPDYKGIACHICSNPNKHGEQCQEDCGCVHGLCDNRPGSGGVCQQGTCAPGFSGRFCNESMGDCGPTGLAQHCHLHARCVSQEGVARCRCLDGFEGDGFSCTPSNPCSHPDRGGCSENAECVPGSLGTHHCTCHKGWSGDGRVCVAIDECELDMRGGCHTDALCSYVGPGQSRCTCKLGFAGDGYQCSPIDPCRAGNGGCHGLATCRAVGGGQRVCTCPPGFGGDGFSCYGDIFRELEANAHFSIFYQWLKSAGITLPADRRVTALVPSEAAVRQLSPEDRAFWLQPRTLPNLVRAHFLQGALFEEELARLGGQEVATLNPTTRWEIRNISGRVWVQNASVDVADLLATNGVLHILSQVLLPPRGDVPGGQGLLQQLDLVPAFSLFRELLQHHGLVPQIEAATAYTIFVPTNRSLEAQGNSSHLDADTVRHHVVLGEALSMETLRKGGHRNSLLGPAHWIVFYNHSGQPEVNHVPLEGPMLEAPGRSLIGLSGVLTVGSSRCLHSHAEALREKCVNCTRRFRCTQGFQLQDTPRKSCVYRSGFSFSRGCSYTCAKKIQVPDCCPGFFGTLCEPCPGGLGGVCSGHGQCQDRFLGSGECHCHEGFHGTACEVCELGRYGPNCTGVCDCAHGLCQEGLQGDGSCVCNVGWQGLRCDQKITSPQCPRKCDPNANCVQDSAGASTCACAAGYSGNGIFCSEVDPCAHGHGGCSPHANCTKVAPGQRTCTCQDGYMGDGELCQEINSCLIHHGGCHIHAECIPTGPQQVSCSCREGYSGDGIRTCELLDPCSKNNGGCSPYATCKSTGDGQRTCTCDTAHTVGDGLTCRARVGLELLRDKHASFFSLRLLEYKELKGDGPFTIFVPHADLMSNLSQDELARIRAHRQLVFRYHVVGCRRLRSEDLLEQGYATALSGHPLRFSEREGSIYLNDFARVVSSDHEAVNGILHFIDRVLLPPEALHWEPDDAPIPRRNVTAAAQGFGYKIFSGLLKVAGLLPLLREASHRPFTMLWPTDAAFRALPPDRQAWLYHEDHRDKLAAILRGHMIRNVEALASDLPNLGPLRTMHGTPISFSCSRTRAGELMVGEDDARIVQRHLPFEGGLAYGIDQLLEPPGLGARCDHFETRPLRLNTCSICGLEPPCPEGSQEQGSPEACWRFYPKFWTSPPLHSLGLRSVWVHPSLWGRPQGLGRGCHRNCVTTTWKPSCCPGHYGSECQACPGGPSSPCSDRGVCMDGMSGSGQCLCRSGFAGTACELCAPGAFGPHCQACRCTVHGRCDEGLGGSGSCFCDEGWTGPRCEVQLELQPVCTPPCAPEAVCRAGNSCECSLGYEGDGRVCTVADLCQDGHGGCSEHANCSQVGTMVTCTCLPDYEGDGWSCRARNPCTDGHRGGCSEHANCLSTGLNTRRCECHAGYVGDGLQCLEESEPPVDRCLGQPPPCHSDAMCTDLHFQEKRAGVFHLQATSGPYGLNFSEAEAACEAQGAVLASFPQLSAAQQLGFHLCLMGWLANGSTAHPVVFPVADCGNGRVGIVSLGARKNLSERWDAYCFRVQDVACRCRNGFVGDGISTCNGKLLDVLAATANFSTFYGMLLGYANATQRGLDFLDFLDDELTYKTLFVPVNEGFVDNMTLSGPDLELHASNATLLSANASQGKLLPAHSGLSLIISDAGPDNSSWAPVAPGTVVVSRIIVWDIMAFNGIIHALASPLLAPPQPQAVLAPEAPPVAA

SEQ ID NO: 3030 - protein, 2458 aa, synthetic construct
  REGION 1..2458: note = STAB2 (Q8WWQ8) SP+PP+ECD
MMLQHLVIFCLGLVVQNFCSPAETTGQARRCDRKSLLTIRTECRSCALNLGVKCPDGYTMITSGSVGVRDCRYTFEVRTYSLSLPGCRHICRKDYLQPRCCPGRWGPDCIECPGGAGSPCNGRGSCAEGMEGNGTCSCQEGFGGTACETCADDNLFGPSCSSVCNCVHGVCNSGLDGDGTCECYSAYTGPKCDKPIPECAALLCPENSRCSPSTEDENKLECKCLPNYRGDGKYCDPINPCLRKICHPHAHCTYLGPNRHSCTCQEGYRGDGQVCLPVDPCQINFGNCPTKSTVCKYDGPGQSHCECKEHYQNFVPGVGCSMTDICKSDNPCHRNANCTTVAPGRTECICQKGYVGDGLTCYGNIMERLRELNTEPRGKWQGRLTSFISLLDKAYAWPLSKLGPFTVLLPTDKGLKGFNVNELLVDNKAAQYFVKLHIIAGQMNIEYMNNTDMFYTLTGKSGEIFNSDKDNQIKLKLHGGKKKVKIIQGDIIASNGLLHILDRAMDKLEPTFESNNEQTIMTMLQPRYSKFRSLLEETNLGHALDEDGVGGPYTIFVPNNEALNNMKDGTLDYLLSPEGSRKLLELVRYHIVPFTQLEVATLISTPHIRSMANQLIQFNTTDNGQILANDVAMEEIEITAKNGRIYTLTGVLIPPSIVPILPHRCDETKREMKLGTCVSCSLVYWSRCPANSEPTALFTHRCVYSGRFGSLKSGCARYCNATVKIPKCCKGFYGPDCNQCPGGFSNPCSGNGQCADSLGGNGTCICEEGFQGSQCQFCSDPNKYGPRCNKKCLCVHGTCNNRIDSDGACLTGTCRDGSAGRLCDKQTSACGPYVQFCHIHATCEYSNGTASCICKAGYEGDGTLCSEMDPCTGLTPGGCSRNAECIKTGTGTHTCVCQQGWTGNGRDCSEINNCLLPSAGGCHDNASCLYVGPGQNECECKKGFRGNGIDCEPITSCLEQTGKCHPLASCQSTSSGVWSCVCQEGYEGDGFLCYGNAAVELSFLSEAAIFNRWINNASLQPTLSATSNLTVLVPSQQATEDMDQDEKSFWLSQSNIPALIKYHMLLGTYRVADLQTLSSSDMLATSLQGNFLHLAKVDGNITIEGASIVDGDNAATNGVIHIINKVLVPQRRLTGSLPNLLMRLEQMPDYSIFRGYIIQYNLANAIEAADAYTVFAPNNNAIENYIREKKVLSLEEDVLRYHVVLEEKLLKNDLHNGMHRETMLGFSYFLSFFLHNDQLYVNEAPINYTNVATDKGVIHGLGKVLEIQKNRCDNNDTTIIRGRCRTCSSELTCPFGTKSLGNEKRRCIYTSYFMGRRTLFIGCQPKCVRTVITRECCAGFFGPQCQPCPGNAQNVCFGNGICLDGVNGTGVCECGEGFSGTACETCTEGKYGIHCDQACSCVHGRCNQGPLGDGSCDCDVGWRGVHCDNATTEDNCNGTCHTSANCLTNSDGTASCKCAAGFQGNGTICTAINACEISNGGCSAKADCKRTTPGRRVCTCKAGYTGDGIVCLEINPCLENHGGCDKNAECTQTGPNQAACNCLPAYTGDGKVCTLINVCLTKNGGCSEFAICNHTGQVERTCTCKPNYIGDGFTCRGSIYQELPKNPKTSQYFFQLQEHFVKDLVGPGPFTVFAPLSAAFDEEARVKDWDKYGLMPQVLRYHVVACHQLLLENLKLISNATSLQGEPIVISVSQSTVYINNKAKIISSDIISTNGIVHIIDKLLSPKNLLITPKDNSGRILQNLTTLATNNGYIKFSNLIQDSGLLSVITDPIHTPVTLFWPTDQALHALPAEQQDFLFNQDNKDKLKEYLKFHVIRDAKVLAVDLPTSTAWKTLQGSELSVKCGAGRDIGDLFLNGQTCRIVQRELLFDLGVAYGIDCLLIDPTLGGRCDTFTTFDASGECGSCVNTPSCPRWSKPKGVKQKCLYNLPFKRNLEGCRERCSLVIQIPRCCKGYFGRDCQACPGGPDAPCNNRGVCLDQYSATGECKCNTGFNGTACEMCWPGRFGPDCLPCGCSDHGQCDDGITGSGQCLCETGWTGPSCDTQAVLPAVCTPPCSAHATCKENNTCECNLDYEGDGITCTVVDFCKQDNGGCAKVARCSQKGTKVSCSCQKGYKGDGHSCTEIDPCADGLNGGCHEHATCKMTGPGKHKCECKSHYVGDGLNCEPEQLPIDRCLQDNGQCHADAKCVDLHFQDTTVGVFHLRSPLGQYKLTFDKAREACANEAATMATYNQLSYAQKAKYHLCSAGWLETGRVAYPTAFASQNCGSGVVGIVDYGPRPNKSEMWDVFCYRMKDVNCTCKVGYVGDGFSCSGNLLQVLMSFPSLTNFLTEVLAYSNSSARGRAFLEHLTDLSIRGTLFVPQNSGLGENETLSGRDIEHHLANVSMFFYNDLVNGTTLQTRLGSKLLITASQDPLQPTETRFVDGRAILQWDIFASNGIIHVISRPLKAPPAPVTLTHT

SEQ ID NO: 3031 - protein, 213 aa, synthetic construct
  REGION 1..213: note = STIM1 (Q13586) SP+PP+ECD
MDVCVRLALWLLWGLLLHQGQSLSHSHSEKATGTSSGANSEESTAAEFCRIDKPLCHSEDEKLSFEAVRNIHKLMDDDANGDVDVEESDEFLREDLNYHDPTVKHSTFHGEDKLISVEDLWKAWKSSEVYNWTVDEVVQWLITYVELPQYEETFRKLQLSGHAMPRLAVTNTTMTGTVLKMTDRSHRQKLQLKALDTVLFGPPLLTRHNHLKD

SEQ ID NO: 3032 - protein, 1010 aa, synthetic construct
  REGION 1..1010: note = SUCO (Q9UBS9) SP+PP+ECD
MKKHRRALALVSCLFLCSLVWLPSWRVCCKESSSASASSYYSQDDNCALENEDVQFQKKDEREGPINAESLGKSGSNLPISPKEHKLKDDSIVDVQNTESKKLSPPVVETLPTVDLHEESSNAVVDSETVENISSSSTSEITPISKLDEIEKSGTIPIAKPSETEQSETDCDVGEALDASAPIEQPSFVSPPDSLVGQHIENVSSSHGKGKITKSEFESKVSASEQGGGDPKSALNASDNLKNESSDYTKPGDIDPTSVASPKDPEDIPTFDEWKKKVMEVEKEKSQSMHASSNGGSHATKKVQKNRNNYASVECGAKILAANPEAKSTSAILIENMDLYMLNPCSTKIWFVIELCEPIQVKQLDIANYELFSSTPKDFLVSISDRYPTNKWIKLGTFHGRDERNVQSFPLDEQMYAKYVKMFIKYIKVELLSHFGSEHFCPLSLIRVFGTSMVEEYEEIADSQYHSERQELFDEDYDYPLDYNTGEDKSSKNLLGSATNAILNMVNIAANILGAKTEDLTEGNKSISENATATAAPKMPESTPVSTPVPSPEYVTTEVHTHDMEPSTPDTPKESPIVQLVQEEEEEASPSTVTLLGSGEQEDESSPWFESETQIFCSELTTICCISSFSEYIYKWCSVRVALYRQRSRTALSKGKDYLVLAQPPLLLPAESVDVSVLQPLSGELENTNIEREAETVVLGDLSSSMHQDDLVNHTVDAVELEPSHSQTLSQSLLLDITPEINPLPKIEVSESVEYEAGHIPSPVIPQESSVEIDNETEQKSESFSSIEKPSITYETNKVNELMDNIIKEDVNSMQIFTKLSETIVPPINTATVPDNEDGEAKMNIADTAKQTLISVVDSSSLPEVKEEEQSPEDALLRGLQRTATDFYAELQNSTDLGYANGNLVHGSNQKESVFMRLNNRIKALEVNMSLSGRYLEELSQRYRKQMEEMQKAFNKTIVKLQNTSRIAEEQDQRQTEAIQLLQAQLTNMTQLVSNLSATVAELKREVSDR

SEQ ID NO: 3033 - protein, 721 aa, synthetic construct
  REGION 1..721: note = SUSD1 (Q6UWL2) SP+PP+ECD
MGRGPWDAGPSRRLLPLLLLLGLARGAAGAPGPDGLDVCATCHEHATCQQREGKKICICNYGFVGNGRTQCVDKNECQFGATLVCGNHTSCHNTPGGFYCICLEGYRATNNNKTFIPNDGTFCTDIDECEVSGLCRHGGRCVNTHGSFECYCMDGYLPRNGPEPFHPTTDATSCTEIDCGTPPEVPDGYIIGNYTSSLGSQVRYACREGFFSVPEDTVSSCTGLGTWESPKLHCQEINCGNPPEMRHAILVGNHSSRLGGVARYVCQEGFESPGGKITSVCTEKGTWRESTLTCTEILTKINDVSLFNDTCVRWQINSRRINPKISYVISIKGQRLDPMESVREETVNLTTDSRTPEVCLALYPGTNYTVNISTAPPRRSMPAVIGFQTAEVDLLEDDGSFNISIFNETCLKLNRRSRKVGSEHMYQFTVLGQRWYLANFSHATSFNFTTREQVPVVCLDLYPTTDYTVNVTLLRSPKRHSVQITIATPPAVKQTISNISGFNETCLRWRSIKTADMEEMYLFHIWGQRWYQKEFAQEMTFNISSSSRDPEVCLDLRPGTNYNVSLRALSSELPVVISLTTQITEPPLPEVEFFTVHRGPLPRLRLRKAKEKNGPISSYQVLVLPLALQSTFSCDSEGASSFFSNASDADGYVAAELLAKDVPDDAMEIPIGDRLYYGEYYNAPLKRGSDYCIILRITSEWNKVRRHSCAVWAQVKDSSLM

SEQ ID NO: 3034 - protein, 785 aa, synthetic construct
  REGION 1..785: note = SUSD2 (Q9UGT4) SP+PP+ECD
MKPALLPWALLLLATALGPGPGPTADAQESCSMRCGALDGPCSCHPTCSGLGTCCLDFRDFCLEILPYSGSMMGGKDFVVRHFKMSSPTDASVICRFKDSIQTLGHVDSSGQVHCVSPLLYESGRIPFTVSLDNGHSFPRAGTWLAVHPNKVSMMEKSELVNETRWQYYGTANTSGNLSLTWHVKSLPTQTITIELWGYEETGMPYSQEWTAKWSYLYPLATHIPNSGSFTFTPKPAPPSYQRWRVGALRIIDSKNYAGQKDVQALWTNDHALAWHLSDDFREDPVAWARTQCQAWEELEDQLPNFLEELPDCPCTLTQARADSGRFFTDYGCDMEQGSVCTYHPGAVHCVRSVQASLRYGSGQQCCYTADGTQLLTADSSGGSTPDRGHDWGAPPFRTPPRVPSMSHWLYDVLSFYYCCLWAPDCPRYMQRRPSNDCRNYRPPRLASAFGDPHFVTFDGTNFTFNGRGEYVLLEAALTDLRVQARAQPGTMSNGTETRGTGLTAVAVQEGNSDVVEVRLANRTGGLEVLLNQEVLSFTEQSWMDLKGMFLSVAAGDRVSIMLASGAGLEVSVQGPFLSVSVLLPEKFLTHTHGLLGTLNNDPTDDFTLHSGRVLPPGTSPQELFLFGANWTVHNASSLLTYDSWFLVHNFLYQPKHDPTFEPLFPSETTLNPSLAQEAAKLCGDDHFCNFDVAATGSLSTGTATRVAHQLHQRRMQSLQPVVSCGWLAPPPNGQKEGNRYLAGSTIYFHCDNGYSLAGAETSTCQADGTWSSPTPKCQPGRSYA

SEQ ID NO: 3035 - protein, 319 aa, synthetic construct
  REGION 1..319: note = SUSD4 (Q5VX71) SP+PP+ECD
MYHGMNPSNGDGFLEQQQQQQQPQSPQRLLAVILWFQLALCFGPAQLTGGFDDLQVCADPGIPENGFRTPSGGVFFEGSVARFHCQDGFKLKGATKRLCLKHFNGTLGWIPSDNSICVQEDCRIPQIEDAEIHNKTYRHGEKLIITCHEGFKIRYPDLHNMVSLCRDDGTWNNLPICQGCLRPLASSNGYVNISELQTSFPVGTVISYRCFPGFKLDGSAYLECLQNLIWSSSPPRCLALEVCPLPPMVSHGDFVCHPRPCERYNHGTVVEFYCDPGYSLTSDYKYITCQYGEWFPSYQVYCIKSEQTWPSTHETLLTT

SEQ ID NO: 3036 - protein, 574 aa, synthetic construct
  REGION 1..574: note = SUSD5 (O60279) SP+PP+ECD
MTAEGPSPPARWHRRLPGLWAAALLLLGLPRLSVRADGKFFVLESQNGSQGLQLEAARLSCKSRGAHLASADELRRVVQDCSFAVCTTGWLADGTLGTTVCSKGSGEQQIMRAVDVRIESNPVPGGTYSALCIKDEEKPCGDPPSFPHTILQGRTGLEMGDELLYVCAPGHIMGHRETAFTLLCNSCGEWYGLVQACGKDEAEAHIDYEDNFPDDRSVSFRELMEDSRTEADEDRGQGDSSEEAPKQDRLVSISVGRENIARDKVFVPTTGLPGAGSSVPADSPGSRLLQKHLFWFPAEAFHKPGLEKEVDDDTKKQFSAGDNHSGVKLVPGEPETKVIYGNTDGPSGPFVGKNDSKAGDPVVSSSDESWLDGYPVTEGAWRKTEAEEEEDGDRGDGSVGLDENVLVTPDQPILVEVKKPKSSTLTPSEGMTHSSVLPSQMLDVEALALRPVNASETEGIGDGDLTKYQSTLPWRFITEESPMATLSYELTSSTLEILTVNTVKQTPNHIPSTIMATTQPPVETTVPEIQDSFPYLLSEDFFGQEGPGPGASEELHPTLESCVGDGCPGLSRGP

SEQ ID NO: 3037 - protein, 274 aa, synthetic construct
  REGION 1..274: note = TACSTD2 (P09758) SP+PP+ECD
MARGPGLAPPPLRLPLLLLVLAAVTGHTAAQDNCTCPTNKMTVCSPDGPGGRCQCRALGSGMAVDCSTLTSKCLLLKARMSAPKNARTLVRPSEHALVDNDGLYDPDCDPEGRFKARQCNQTSVCWCVNSVGVRRTDKGDLSLRCDELVRTHHILIDLRHRPTAGAFNHSDLDAELRRLFRERYRLHPKFVAAVHYEQPTIQIELRQNTSQKAAGDVDIGDAAYYFERDIKGESLFQGRGGLDLRVRGEPLQVERTLIYYLDEIPPKFSMKRLT

SEQ ID NO: 3038 - protein, 236 aa, synthetic construct
  REGION 1..236: note = TARM1 (B6A8C7) SP+PP+ECD
MIPKLLSLLCFRLCVGQGDTRGDGSLPKPSLSAWPSSVVPANSNVTLRCWTPARGVSFVLRKGGIILESPKPLDSTEGAAEFHLNNLKVRNAGEYTCEYYRKASPHILSQRSDVLLLLVTGHLSKPFLRTYQRGTVTAGGRVTLQCQKRDQLFVPIMFALLKAGTPSPIQLQSPAGKEIDFSLVDVTAGDAGNYSCMYYQTKSPFWASEPSDQLEILVTVPPGTTSSNYSLGNFVR

SEQ ID NO: 3039 - protein, 668 aa, synthetic construct
  REGION 1..668: note = TCTN2 (Q96GX1) SP+PP+ECD
MGFQPPAALLLRLFLLQGILRLLWGDLAFIPPFIRMSGPAVSASLVGDTEGVTVSLAVLQDEAGILPIPTCGVLNNETEDWSVTVIPGAKVLEVTVRWKRGLDWCSSNETDSFSESPCILQTLLVSASHNSSCSAHLLIQVEIYANSSLTHNASENVTVIPNQVYQPLGPCPCNLTAGACDVRCCCDQECSSNLTTLFRRSCFTGVFGGDVNPPFDQLCSAGTTTRGVPDWFPFLCVQSPLANTPFLGYFYHGAVSPKQDSSFEVYVDTDAKDFADFGYKQGDPIMTVKKAYFTIPQVSLAGQCMQNAPVAFLHNFDVKCVTNLELYQERDGIINAKIKNVALGGIVTPKVIYEEATDLDKFITNTETPLNNGSTPRIVNVEEHYIFKWNNNTISEINVKIFRAEINAHQKGIMTQRFVVKFLSYNSGNEEELSGNPGYQLGKPVRALNINRMNNVTTLHLWQSAGRGLCTSATFKPILFGENVLSGCLLEVGINENCTQLRENAVERLDSLIQATHVAMRGNSDYADLSDGWLEIIRVDAPDPGADPLASSVNGMCLDIPAHLSIRILISDAGAVEGITQQEILGVETRFSSVNWQYQCGLTCEHKADLLPISASVQFIKIPAQLPHPLTRFQINYTEYDCNRNEVCWPQLLYPWTQYYQGELHSQC

SEQ ID NO: 3040 - protein, 581 aa, synthetic construct
  REGION 1..581: note = TCTN3 (Q6NUS6) SP+PP+ECD
MRTPQLALLQVFFLVFPDGVRPQPSSSPSGAVPTSLELQRGTDGGTLQSPSEATATRPAVPGLPTVVPTLVTPSAPGNRTVDLFPVLPICVCDLTPGACDINCCCDRDCYLLHPRTVFSFCLPGSVRSSSWVCVDNSVIFRSNSPFPSRVFMDSNGIRQFCVHVNNSNLNYFQKLQKVNATNFQALAAEFGGESFTSTFQTQSPPSFYRAGDPILTYFPKWSVISLLRQPAGVGAGGLCAESNPAGFLESKSTTCTRFFKNLASSCTLDSALNAASYYNFTVLKVPRSMTDPQNMEFQVPVILTSQANAPLLAGNTCQNVVSQVTYEIETNGTFGIQKVSVSLGQTNLTVEPGASLQQHFILRFRAFQQSTAASLTSPRSGNPGYIVGKPLLALTDDISYSMTLLQSQGNGSCSVKRHEVQFGVNAISGCKLRLKKADCSHLQQEIYQTLHGRPRPEYVAIFGNADPAQKGGWTRILNRHCSISAINCTSCCLIPVSLEIQVLWAYVGLLSNPQAHVSGVRFLYQCQSIQDSQQVTEVSLTTLVNFVDITQKPQPPRGQPKMDWKWPFDFFPFKVAFSRGV

SEQ ID NO: 3041 - protein, 748 aa, synthetic construct
  REGION 1..748: note = TEK (Q02763) SP+PP+ECD
MDSLASLVLCGVSLLLSGTVEGAMDLILINSLPLVSDAETSLTCIASGWRPHEPITIGRDFEALMNQHQDPLEVTQDVTREWAKKVVWKREKASKINGAYFCEGRVRGEAIRIRTMKMRQQASFLPATLTMTVDKGDNVNISFKKVLIKEEDAVIYKNGSFIHSVPRHEVPDILEVHLPHAQPQDAGVYSARYIGGNLFTSAFTRLIVRRCEAQKWGPECNHLCTACMNNGVCHEDTGECICPPGFMGRTCEKACELHTFGRTCKERCSGQEGCKSYVFCLPDPYGCSCATGWKGLQCNEACHPGFYGPDCKLRCSCNNGEMCDRFQGCLCSPGWQGLQCEREGIQRMTPKIVDLPDHIEVNSGKFNPICKASGWPLPTNEEMTLVKPDGTVLHPKDFNHTDHFSVAIFTIHRILPPDSGVWVCSVNTVAGMVEKPFNISVKVLPKPLNAPNVIDTGHNFAVINISSEPYFGDGPIKSKKLLYKPVNHYEAWQHIQVTNEIVTLNYLEPRTEYELCVQLVRRGEGGEGHPGPVRRFTTASIGLPPPRGLNLLPKSQTTLNLTWQPIFPSSEDDFYVEVERRSVQKSDQQNIKVPGNLTSVLLNNLHPREQYVVRARVNTKAQGEWSEDLTAWTLSDILPPQPENIKISNITHSSAVISWTILDGYSISSITIRYKVQGKNEDQHVDVKIKNATITQYQLKGLEPETAYQVDIFAENNIGSSNPAFSHELVTLPESQAPADLGGGKMLL

SEQ ID NO: 3042 - protein, 98 aa, synthetic construct
  REGION 1..98: note = TGFA (P01135) SP+PP+ECD
MVPSAGQLALFALGIVLAACQALENSTSPLSADPPVAAAVVSHFNDCPDSHTQFCFHGTCRFLVQEDKPACVCHSGYVGARCEHADLLAVVAASQKKQ

SEQ ID NO: 3043 - protein, 126 aa, synthetic construct
  REGION 1..126: note = TGFBR1 (P36897) SP+PP+ECD
MEAAVAAPRPRLLLLVLAAAAAAAAALLPGATALQCFCHLCTKDNFTCVTDGLCFVSVTETTDKVIHNSMCIAEIDLIPRDRPFVCAPSSKTGSVTTTYCCNQDHCNKIELPTTVKSSPGLGPVEL

SEQ ID NO: 3044 - protein, 166 aa, synthetic construct
  REGION 1..166: note = TGFBR2 (P37173) SP+PP+ECD
MGRGLLRGLWPLHIVLWTRIASTIPPHVQKSVNNDMIVTDNNGAVKFPQLCKFCDVRFSTCDNQKSCMSNCSITSICEKPQEVCVAVWRKNDENITLETVCHDPKLPYHDFILEDAASPKCIMKEKKKPGETFFMCSCSSDECNDNIIFSEEYNTSNPDLLLVIFQ

SEQ ID NO: 3045 - protein, 787 aa, synthetic construct
  REGION 1..787: note = TGFBR3 (Q03167) SP+PP+ECD
MTSHYVIAIFALMSSCLATAGPEPGALCELSPVSASHPVQALMESFTVLSGCASRGTTGLPQEVHVLNLRTAGQGPGQLQREVTLHLNPISSVHIHHKSVVFLLNSPHPLVWHLKTERLATGVSRLFLVSEGSVVQFSSANFSLTAETEERNFPHGNEHLLNWARKEYGAVTSFTELKIARNIYIKVGEDQVFPPKCNIGKNFLSLNYLAEYLQPKAAEGCVMSSQPQNEEVHIIELITPNSNPYSAFQVDITIDIRPSQEDLEVVKNLILILKCKKSVNWVIKSFDVKGSLKIIAPNSIGFGKESERSMTMTKSIRDDIPSTQGNLVKWALDNGYSPITSYTMAPVANRFHLRLENNAEEMGDEEVHTIPPELRILLDPGALPALQNPPIRGGEGQNGGLPFPFPDISRRVWNEEGEDGLPRPKDPVIPSIQLFPGLREPEEVQGSVDIALSVKCDNEKMIVAVEKDSFQASGYSGMDVTLLDPTCKAKMNGTHFVLESPLNGCGTRPRWSALDGVVYYNSIVIQVPALGDSSGWPDGYEDLESGDNGFPGDMDEGDASLFTRPEIVVFNCSLQQVRNPSSFQEQPHGNITFNMELYNTDLFLVPSQGVFSVPENGHVYVEVSVTKAEQELGFAIQTCFISPYSNPDRMSHYTIIENICPKDESVKFYSPKRVHFPIPQADMDKKRFSFVFKPVFNTSLLFLQCELTLCTKMEKHPQKLPKCVPPDEACTSLDASIIWAMMQNKKTFTKPLAVIHHEAESKEKGPSMKEPNPISPPIFHGLDTLTV

SEQ ID NO: 3046 - protein, 381 aa, synthetic construct
  REGION 1..381: note = TGOLN2 (O43493) SP+PP+ECD
MRFVVALVLLNVAAAGAVPLLATESVKQEEAGVRPSAGNVSTHPSLSQRPGGSTKSHPEPQTPKDSPSKSSAEAQTPEDTPNKSGAEAKTQKDSSNKSGAEAKTQKGSTSKSGSEAQTTKDSTSKSHPELQTPKDSTGKSGAEAQTPEDSPNRSGAEAKTQKDSPSKSGSEAQTTKDVPNKSGADGQTPKDGSSKSGAEDQTPKDVPNKSGAEKQTPKDGSNKSGAEEQGPIDGPSKSGAEEQTSKDSPNKVVPEQPSRKDHSKPISNPSDNKELPKADTNQLADKGKLSPHAFKTESGEETDLISPPQEEVKSSEPTEDVEPKEAEDDDTGPEEGSPPKEEKEKMSGSASSENREGTLSDSTGSEKDDLYPNGSGNGSAE

SEQ ID NO: 3047 - protein, 515 aa, synthetic construct
  REGION 1..515: note = THBD (P07204) SP+PP+ECD
MLGVLVLGALALAGLGFPAPAEPQPGGSQCVEHDCFALYPGPATFLNASQICDGLRGHLMTVRSSVAADVISLLLNGDGGVGRRRLWIGLQLPPGCGDPKRLGPLRGFQWVTGDNNTSYSRWARLDLNGAPLCGPLCVAVSAAEATVPSEPIWEEQQCEVKADGFLCEFHFPATCRPLAVEPGAAAAAVSITYGTPFAARGADFQALPVGSSAAVAPLGLQLMCTAPPGAVQGHWAREAPGAWDCSVENGGCEHACNAIPGAPRCQCPAGAALQADGRSCTASATQSCNDLCEHFCVPNPDQPGSYSCMCETGYRLAADQHRCEDVDDCILEPSPCPQRCVNTQGGFECHCYPNYDLVDGECVEPVDPCFRANCEYQCQPLNQTSYLCVCAEGFAPIPHEPHRCQMFCNQTACPADCDPNTQASCECPEGYILDDGFICTDIDECENGGFCSGVCHNLPGTFECICGPDSALARHIGTDCDSGKVDGGDSGSGEPPPSPTPGSTLTPPAVGLVHS

SEQ ID NO: 3048 - protein, 413 aa, synthetic construct
  REGION 1..413: note = THSD1 (Q9NS62) SP+PP+ECD
MKPMLKDFSNLLLVVLCDYVLGEAEYLLLREPGHVALSNDTVYVDFQYFDGANGTLRNVSVLLLEANTNQTVTTKYLLTNQSQGTLKFECFYFKEAGDYWFTMTPEATDNSTPFPWWEKSAFLKVEWPVFHVDLNRSAKAAEGTFQVGLFTSQPLCPFPVDKPNIVVDVIFTNSLPEARRNSRQPLEIRTSKRTELAQGQWVEFGCAPLGPEAYVTVVLKLLGRDSVITSTGPIDLAQKFGYKLVMVPELTCESGVEVTVLPPPCTFVQGVVTVFKEAPRYPGKRTIHLAENSLPLGERRTIFNCTLFDMGKNKYCFDFGISSRSHFSAKEECMLIQRNTETWGLWQPWSQCSATCGDGVRERRRVCLTSFPSSPVCPGMSLEASLCSLEECAAFQPSSPSPLQPQGPVKSNN

SEQ ID NO: 3049 - protein, 1607 aa, synthetic construct
  REGION 1..1607: note = THSD7A (Q9UPZ6) SP+PP+ECD
MGLQARRWASGSRGAAGPRRGVLQLLPLPLPLPLLLLLLLRPGAGRAAAQGEAEAPTLYLWKTGPWGRCMGDECGPGGIQTRAVWCAHVEGWTTLHTNCKQAERPNNQQNCFKVCDWHKELYDWRLGPWNQCQPVISKSLEKPLECIKGEEGIQVREIACIQKDKDIPAEDIICEYFEPKPLLEQACLIPCQQDCIVSEFSAWSECSKTCGSGLQHRTRHVVAPPQFGGSGCPNLTEFQVCQSSPCEAEELRYSLHVGPWSTCSMPHSRQVRQARRRGKNKEREKDRSKGVKDPEARELIKKKRNRNRQNRQENKYWDIQIGYQTREVMCINKTGKAADLSFCQQEKLPMTFQSCVITKECQVSEWSEWSPCSKTCHDMVSPAGTRVRTRTIRQFPIGSEKECPEFEEKEPCLSQGDGVVPCATYGWRTTEWTECRVDPLLSQQDKRRGNQTALCGGGIQTREVYCVQANENLLSQLSTHKNKEASKPMDLKLCTGPIPNTTQLCHIPCPTECEVSPWSAWGPCTYENCNDQQGKKGFKLRKRRITNEPTGGSGVTGNCPHLLEAIPCEEPACYDWKAVRLGNCEPDNGKECGPGTQVQEVVCINSDGEEVDRQLCRDAIFPIPVACDAPCPKDCVLSTWSTWSSCSHTCSGKTTEGKQIRARSILAYAGEEGGIRCPNSSALQEVRSCNEHPCTVYHWQTGPWGQCIEDTSVSSFNTTTTWNGEASCSVGMQTRKVICVRVNVGQVGPKKCPESLRPETVRPCLLPCKKDCIVTPYSDWTSCPSSCKEGDSSIRKQSRHRVIIQLPANGGRDCTDPLYEEKACEAPQACQSYRWKTHKWRRCQLVPWSVQQDSPGAQEGCGPGRQARAITCRKQDGGQAGIHECLQYAGPVPALTQACQIPCQDDCQLTSWSKFSSCNGDCGAVRTRKRTLVGKSKKKEKCKNSHLYPLIETQYCPCDKYNAQPVGNWSDCILPEGKVEVLLGMKVQGDIKECGQGYRYQAMACYDQNGRLVETSRCNSHGYIEEACIIPCPSDCKLSEWSNWSRCSKSCGSGVKVRSKWLREKPYNGGRPCPKLDHVNQAQVYEVVPCHSDCNQYLWVTEPWSICKVTFVNMRENCGEGVQTRKVRCMQNTADGPSEHVEDYLCDPEEMPLGSRVCKLPCPEDCVISEWGPWTQCVLPCNQSSFRQRSADPIRQPADEGRSCPNAVEKEPCNLNKNCYHYDYNVTDWSTCQLSEKAVCGNGIKTRMLDCVRSDGKSVDLKYCEALGLEKNWQMNTSCMVECPVNCQLSDWSPWSECSQTCGLTGKMIRRRTVTQPFQGDGRPCPSLMDQSKPCPVKPCYRWQYGQWSPCQVQEAQCGEGTRTRNISCVVSDGSADDFSKVVDEEFCADIELIIDGNKNMVLEESCSQPCPGDCYLKDWSSWSLCQLTCVNGEDLGFGGIQVRSRPVIIQELENQHLCPEQMLETKSCYDGQCYEYKWMASAWKGSSRTVWCQRSDGINVTGGCLVMSQPDADRSCNPPCSQPHSYCSETKTCHCEEGYTEVMSSNSTLEQCTLIPVVVLPTMEDKRGDVKTSRAVHPTQPSSNPAGRGRTWFLQPFGPDGRLKTW

SEQ ID NO: 3050 - protein, 1555 aa, synthetic construct
  REGION 1..1555: note = THSD7B (Q9C0I4) SP+PP+ECD
MFPKSNLTVTCWVWRSMRKLFLLLSLLLSHAAHLEGKKDNQFIWKPGPWGRCTGDCGPGGVQSRAVWCFHVDGWTSHLSNCGESNRPPKERSCFRVCDWHSDLFQWEVSDWHHCVLVPYARGEVKPRTAECVTAQHGLQHRMVRCIQKLNRTVVANEICEHFALQPPTEQACLIPCPRDCVVSEFLPWSNCSKGCGKKLQHRTRAVIAPPLFGGLQCPNLTESRACDAPISCPLGEEEYTFSLKVGPWSKCRLPHLKEINPSGRTVLDFNSDSNERVTFKHQSYKAHHHSKSWAIEIGYQTRQVSCTRSDGQNAMLSLCLQDSFPLTVQSCIMPKDCETSQWSSWSPCSKTCRSGSLLPGFRSRSRNVKHMAIGGGKECPELLEKEACIVEGELLQQCPRYSWRTSEWKECQVSLLLEQQDPHWHVTGPVCGGGIQTREVYCAQSVPAAAALRAKEVSRPVEKALCVGPAPLPSQLCNIPCSTDCIVSSWSAWGLCIHENCHDPQGKKGFRTRQRHVLMESTGPAGHCPHLVESVPCEDPMCYRWLASEGICFPDHGKCGLGHRILKAVCQNDRGEDVSGSLCPVPPPPERKSCEIPCRMDCVLSEWTEWSSCSQSCSNKNSDGKQTRSRTILALAGEGGKPCPPSQALQEHRLCNDHSCMQLHWETSPWGPCSEDTLVTALNATIGWNGEATCGVGIQTRRVFCVKSHVGQVMTKRCPDSTRPETVRPCFLPCKKDCIVTAFSEWTPCPRMCQAGNATVKQSRYRIIIQEAANGGQECPDTLYEERECEDVSLCPVYRWKPQKWSPCILVPESVWQGITGSSEACGKGLQTRAVSCISDDNRSAEMMECLKQTNGMPLLVQECTVPCREDCTFTAWSKFTPCSTNCEATKSRRRQLTGKSRKKEKCQDSDLYPLVETELCPCDEFISQPYGNWSDCILPEGRREPHRGLRVQADSKECGEGLRFRAVACSDKNGRPVDPSFCSSSGYIQEKCVIPCPFDCKLSDWSSWGSCSSSCGIGVRIRSKWLKEKPYNGGRPCPKLDLKNQVHEAVPCYSECNQYSWVVEHWSSCKINNELRSLRCGGGTQSRKIRCVNTADGEGGAVDSNLCNQDEIPPETQSCSLMCPNECVMSEWGLWSKCPQSCDPHTMQRRTRHLLRPSLNSRTCAEDSQVQPCLLNENCFQFQYNLTEWSTCQLSENAPCGQGVRTRLLSCVCSDGKPVSMDQCEQHNLEKPQRMSIPCLVECVVNCQLSGWTAWTECSQTCGHGGRMSRTRFIIMPTQGEGRPCPTELTQEKTCPVTPCYSWVLGNWSACKLEGGDCGEGVQIRSLSCMVHSGSISHAAGRVEDALCGEMPFQDSILKQLCSVPCPGDCHLTEWSEWSTCELTCIDGRSFETVGRQSRSRTFIIQSFENQDSCPQQVLETRPCTGGKCYHYTWKASLWNNNERTVWCQRSDGVNVTGGCSPQARPAAIRQCIPACRKPFSYCTQGGVCGCEKGYTEIMKSNGFLDYCMKVPGSEDKKADVKNLSGKNRPVNSKIHDIFKGWSLQPLDPDGRVK

SEQ ID NO: 3051 - protein, 759 aa, synthetic construct
  REGION 1..759: note = TIE1 (P35590) SP+PP+ECD
MVWRVPPFLLPILFLASHVGAAVDLTLLANLRLTDPQRFFLTCVSGEAGAGRGSDAWGPPLLLEKDDRIVRTPPGPPLRLARNGSHQVTLRGFSKPSDLVGVFSCVGGAGARRTRVIYVHNSPGAHLLPDKVTHTVNKGDTAVLSARVHKEKQTDVIWKSNGSYFYTLDWHEAQDGRFLLQLPNVQPPSSGIYSATYLEASPLGSAFFRLIVRGCGAGRWGPGCTKECPGCLHGGVCHDHDGECVCPPGFTGTRCEQACREGRFGQSCQEQCPGISGCRGLTFCLPDPYGCSCGSGWRGSQCQEACAPGHFGADCRLQCQCQNGGTCDRFSGCVCPSGWHGVHCEKSDRIPQILNMASELEFNLETMPRINCAAAGNPFPVRGSIELRKPDGTVLLSTKAIVEPEKTTAEFEVPRLVLADSGFWECRVSTSGGQDSRRFKVNVKVPPVPLAAPRLLTKQSRQLVVSPLVSFSGDGPISTVRLHYRPQDSTMDWSTIVVDPSENVTLMNLRPKTGYSVRVQLSRPGEGGEGAWGPPTLMTTDCPEPLLQPWLEGWHVEGTDRLRVSWSLPLVPGPLVGDGFLLRLWDGTRGQERRENVSSPQARTALLTGLTPGTHYQLDVQLYHCTLLGPASPPAHVLLPPSGPPAPRHLHAQALSDSEIQLTWKHPEALPGPISKYVVEVQVAGGAGDPLWIDVDRPEETSTIIRGLNASTRYLFRMRASIQGLGDWSNTVEESTLGNGLQAEGPVQESRAAEEGLDQ

SEQ ID NO: 3052 - protein, 141 aa, synthetic construct
  REGION 1..141: note = TIGIT (Q495A1) SP+PP+ECD
MRWCLLLIWAQGLRQAPLASGMMTGTIETTGNISAEKGGSIILQCHLSSTTAQVTQVNWEQQDQLLAICNADLGWHISPSFKDRVAPGPGLGLTLQSLTVNDTGEYFCIYHTYPDGTYTGRIFLEVLESSVAEHGARFQIP

SEQ ID NO: 3053 - protein, 314 aa, synthetic construct
  REGION 1..314: note = TIMD4 (Q96H15) SP+PP+ECD
MSKEPLILWLMIEFWWLYLTPVTSETVVTEVLGHRVTLPCLYSSWSHNSNSMCWGKDQCPYSGCKEALIRTDGMRVTSRKSAKYRLQGTIPRGDVSLTILNPSESDSGVYCCRIEVPGWFNDVKINVRLNLQRASTTTHRTATTTTRRTTTTSPTTTRQMTTTPAALPTTVVTTPDLTTGTPLQMTTIAVFTTANTCLSLTPSTLPEEATGLLTPEPSKEGPILTAESETVLPSDSWSSVESTSADTVLLTSKESKVWDLPSTSHVSMWKTSDSVSSPQPGASDTAVPEQNKTTKTGQMDGIPMSMKNEMPISQ

SEQ ID NO: 3054 - protein, 580 aa, synthetic construct
  REGION 1..580: note = TLR1 (Q15399) SP+PP+ECD
MTSIFHFAIIFMLILQIRIQLSEESEFLVDRSKNGLIHVPKDLSQKTTILNISQNYISELWTSDILSLSKLRILIISHNRIQYLDISVFKFNQELEYLDLSHNKLVKISCHPTVNLKHLDLSFNAFDALPICKEFGNMSQLKFLGLSTTHLEKSSVLPIAHLNISKVLLVLGETYGEKEDPEGLQDFNTESLHIVFPTNKEFHFILDVSVKTVANLELSNIKCVLEDNKCSYFLSILAKLQTNPKLSNLTLNNIETTWNSFIRILQLVWHTTVWYFSISNVKLQGQLDFRDFDYSGTSLKALSIHQVVSDVFGFPQSYIYEIFSNMNIKNFTVSGTRMVHMLCPSKISPFLHLDFSNNLLTDTVFENCGHLTELETLILQMNQLKELSKIAEMTTQMKSLQQLDISQNSVSYDEKKGDCSWTKSLLSLNMSSNILTDTIFRCLPPRIKVLDLHSNKIKSIPKQVVKLEALQELNVAFNSLTDLPGCGSFSSLSVLIIDHNSVSHPSADFFQSCQKMRSIKAGDNPFQCTCELGEFVKNIDQVSSEVLEGWPDSYKCDYPESYRGTLLKDFHMSELSCNIT

SEQ ID NO: 3055 - protein, 576 aa, synthetic construct
  REGION 1..576: note = TLR10 (Q9BXR5) SP+PP+ECD
MRLIRNIYIFCSIVMTAEGDAPELPEERELMTNCSNMSLRKVPADLTPATTTLDLSYNLLFQLQSSDFHSVSKLRVLILCHNRIQQLDLKTFEFNKELRYLDLSNNRLKSVTWYLLAGLRYLDLSFNDFDTMPICEEAGNMSHLEILGLSGAKIQKSDFQKIAHLHLNTVFLGFRTLPHYEEGSLPILNTTKLHIVLPMDTNFWVLLRDGIKTSKILEMTNIDGKSQFVSYEMQRNLSLENAKTSVLLLNKVDLLWDDLFLILQFVWHTSVEHFQIRNVTFGGKAYLDHNSFDYSNTVMRTIKLEHVHFRVFYIQQDKIYLLLTKMDIENLTISNAQMPHMLFPNYPTKFQYLNFANNILTDELFKRTIQLPHLKTLILNGNKLETLSLVSCFANNTPLEHLDLSQNLLQHKNDENCSWPETVVNMNLSYNKLSDSVFRCLPKSIQILDLNNNQIQTVPKETIHLMALRELNIAFNFLTDLPGCSHFSRLSVLNIEMNFILSPSLDFVQSCQEVKTLNAGRNPFRCTCELKNFIQLETYSEVMMVGWSDSYTCEYPLNLRGTRLKDVHLHELSCNT

SEQ ID NO: 3056 - protein, 588 aa, synthetic construct
  REGION 1..588: note = TLR2 (O60603) SP+PP+ECD
MPHTLWMVWVLGVIISLSKEESSNQASLSCDRNGICKGSSGSLNSIPSGLTEAVKSLDLSNNRITYISNSDLQRCVNLQALVLTSNGINTIEEDSFSSLGSLEHLDLSYNYLSNLSSSWFKPLSSLTFLNLLGNPYKTLGETSLFSHLTKLQILRVGNMDTFTKIQRKDFAGLTFLEELEIDASDLQSYEPKSLKSIQNVSHLILHMKQHILLLEIFVDVTSSVECLELRDTDLDTFHFSELSTGETNSLIKKFTFRNVKITDESLFQVMKLLNQISGLLELEFDDCTLNGVGNFRASDNDRVIDPGKVETLTIRRLHIPRFYLFYDLSTLYSLTERVKRITVENSKVFLVPCLLSQHLKSLEYLDLSENLMVEEYLKNSACEDAWPSLQTLILRQNHLASLEKTGETLLTLKNLTNIDISKNSFHSMPETCQWPEKMKYLNLSSTRIHSVTGCIPKTLEILDVSNNNLNLFSLNLPQLKELYISRNKLMTLPDASLLPMLLVLKISRNAITTFSKEQLDSFHTLKTLEAGGNNFICSCEFLSFTQEQQALAKVLIDWPANYLCDSPSHVRGQQVQDVRLSVSECHRT

SEQ ID NO: 3057 - protein, 704 aa, synthetic construct
  REGION 1..704: note = TLR3 (O15455) SP+PP+ECD
MRQTLPCIYFWGGLLPFGMLCASSTTKCTVSHEVADCSHLKLTQVPDDLPTNITVLNLTHNQLRRLPAANFTRYSQLTSLDVGFNTISKLEPELCQKLPMLKVLNLQHNELSQLSDKTFAFCTNLTELHLMSNSIQKIKNNPFVKQKNLITLDLSHNGLSSTKLGTQVQLENLQELLLSNNKIQALKSEELDIFANSSLKKLELSSNQIKEFSPGCFHAIGRLFGLFLNNVQLGPSLTEKLCLELANTSIRNLSLSNSQLSTTSNTTFLGLKWTNLTMLDLSYNNLNVVGNDSFAWLPQLEYFFLEYNNIQHLFSHSLHGLFNVRYLNLKRSFTKQSISLASLPKIDDFSFQWLKCLEHLNMEDNDIPGIKSNMFTGLINLKYLSLSNSFTSLRTLTNETFVSLAHSPLHILNLTKNKISKIESDAFSWLGHLEVLDLGLNEIGQELTGQEWRGLENIFEIYLSYNKYLQLTRNSFALVPSLQRLMLRRVALKNVDSSPSPFQPLRNLTILDLSNNNIANINDDMLEGLEKLEILDLQHNNLARLWKHANPGGPIYFLKGLSHLHILNLESNGFDEIPVEVFKDLFELKIIDLGLNNLNTLPASVFNNQVSLKSLNLQKNLITSVEKKVFGPAFRNLTELDMRFNPFDCTCESIAWFVNWINETHTNIPELSSHYLCNTPPHYHGFPVRLFDTSSCKDSAPFEL

SEQ ID NO: 3058 - protein, 631 aa, synthetic construct
  REGION 1..631: note = TLR4 (O00206) SP+PP+ECD
MMSASRLAGTLIPAMAFLSCVRPESWEPCVEVVPNITYQCMELNFYKIPDNLPFSTKNLDLSFNPLRHLGSYSFFSFPELQVLDLSRCEIQTIEDGAYQSLSHLSTLILTGNPIQSLALGAFSGLSSLQKLVAVETNLASLENFPIGHLKTLKELNVAHNLIQSFKLPEYFSNLTNLEHLDLSSNKIQSIYCTDLRVLHQMPLLNLSLDLSLNPMNFIQPGAFKEIRLHKLTLRNNFDSLNVMKTCIQGLAGLEVHRLVLGEFRNEGNLEKFDKSALEGLCNLTIEEFRLAYLDYYLDDIIDLFNCLTNVSSFSLVSVTIERVKDFSYNFGWQHLELVNCKFGQFPTLKLKSLKRLTFTSNKGGNAFSEVDLPSLEFLDLSRNGLSFKGCCSQSDFGTTSLKYLDLSFNGVITMSSNFLGLEQLEHLDFQHSNLKQMSEFSVFLSLRNLIYLDISHTHTRVAFNGIFNGLSSLEVLKMAGNSFQENFLPDIFTELRNLTFLDLSQCQLEQLSPTAFNSLSSLQVLNMSHNNFFSLDTFPYKCLNSLQVLDYSLNHIMTSKKQELQHFPSSLAFLNLTQNDFACTCEHQSFLQWIKDQRQLLVEVERMECATPSDKQGMPVLSLNITCQMNK

SEQ ID NO: 3059 - protein, 639 aa, synthetic construct
  REGION 1..639: note = TLR5 (O60602) SP+PP+ECD
MGDHLDLLLGVVLMAGPVFGIPSCSFDGRIAFYRFCNLTQVPQVLNTTERLLLSFNYIRTVTASSFPFLEQLQLLELGSQYTPLTIDKEAFRNLPNLRILDLGSSKIYFLHPDAFQGLFHLFELRLYFCGLSDAVLKDGYFRNLKALTRLDLSKNQIRSLYLHPSFGKLNSLKSIDFSSNQIFLVCEHELEPLQGKTLSFFSLAANSLYSRVSVDWGKCMNPFRNMVLEILDVSGNGWTVDITGNFSNAISKSQAFSLILAHHIMGAGFGFHNIKDPDQNTFAGLARSSVRHLDLSHGFVFSLNSRVFETLKDLKVLNLAYNKINKIADEAFYGLDNLQVLNLSYNLLGELYSSNFYGLPKVAYIDLQKNHIAIIQDQTFKFLEKLQTLDLRDNALTTIHFIPSIPDIFLSGNKLVTLPKINLTANLIHLSENRLENLDILYFLLRVPHLQILILNQNRFSSCSGDQTPSENPSLEQLFLGENMLQLAWETELCWDVFEGLSHLQVLYLNHNYLNSLPPGVFSHLTALRGLSLNSNRLTVLSHNDLPANLEILDISRNQLLAPNPDVFVSLSVLDITHNKFICECELSTFINWLNHTNVTIAGPPADIYCVYPDSFSGVSLFSLSTEGCDEEEVLKSLK

SEQ ID NO: 3060 - protein, 586 aa, synthetic construct
  REGION 1..586: note = TLR6 (Q9Y2C9) SP+PP+ECD
MTKDKEPIVKSFHFVCLMIIIVGTRIQFSDGNEFAVDKSKRGLIHVPKDLPLKTKVLDMSQNYIAELQVSDMSFLSELTVLRLSHNRIQLLDLSVFKFNQDLEYLDLSHNQLQKISCHPIVSFRHLDLSFNDFKALPICKEFGNLSQLNFLGLSAMKLQKLDLLPIAHLHLSYILLDLRNYYIKENETESLQILNAKTLHLVFHPTSLFAIQVNISVNTLGCLQLTNIKLNDDNCQVFIKFLSELTRGSTLLNFTLNHIETTWKCLVRVFQFLWPKPVEYLNIYNLTIIESIREEDFTYSKTTLKALTIEHITNQVFLFSQTALYTVFSEMNIMMLTISDTPFIHMLCPHAPSTFKFLNFTQNVFTDSIFEKCSTLVKLETLILQKNGLKDLFKVGLMTKDMPSLEILDVSWNSLESGRHKENCTWVESIVVLNLSSNMLTDSVFRCLPPRIKVLDLHSNKIKSVPKQVVKLEALQELNVAFNSLTDLPGCGSFSSLSVLIIDHNSVSHPSADFFQSCQKMRSIKAGDNPFQCTCELREFVKNIDQVSSEVLEGWPDSYKCDYPESYRGSPLKDFHMSELSCNITL

SEQ ID NO: 3061 - protein, 839 aa, synthetic construct
  REGION 1..839: note = TLR7 (Q9NYK1) SP+PP+ECD
MVFPMWTLKRQILILFNIILISKLLGARWFPKTLPCDVTLDVPKNHVIVDCTDKHLTEIPGGIPTNTTNLTLTINHIPDISPASFHRLDHLVEIDFRCNCVPIPLGSKNNMCIKRLQIKPRSFSGLTYLKSLYLDGNQLLEIPQGLPPSLQLLSLEANNIFSIRKENLTELANIEILYLGQNCYYRNPCYVSYSIEKDAFLNLTKLKVLSLKDNNVTAVPTVLPSTLTELYLYNNMIAKIQEDDFNNLNQLQILDLSGNCPRCYNAPFPCAPCKNNSPLQIPVNAFDALTELKVLRLHSNSLQHVPPRWFKNINKLQELDLSQNFLAKEIGDAKFLHFLPSLIQLDLSFNFELQVYRASMNLSQAFSSLKSLKILRIRGYVFKELKSFNLSPLHNLQNLEVLDLGTNFIKIANLSMFKQFKRLKVIDLSVNKISPSGDSSEVGFCSNARTSVESYEPQVLEQLHYFRYDKYARSCRFKNKEASFMSVNESCYKYGQTLDLSKNSIFFVKSSDFQHLSFLKCLNLSGNLISQTLNGSEFQPLAELRYLDFSNNRLDLLHSTAFEELHKLEVLDISSNSHYFQSEGITHMLNFTKNLKVLQKLMMNDNDISSSTSRTMESESLRTLEFRGNHLDVLWREGDNRYLQLFKNLLKLEELDISKNSLSFLPSGVFDGMPPNLKNLSLAKNGLKSFSWKKLQCLKNLETLDLSHNQLTTVPERLSNCSRSLKNLILKNNQIRSLTKYFLQDAFQLRYLDLSSNKIQMIQKTSFPENVLNNLKMLLLHHNRFLCTCDAVWFVWWVNHTEVTIPYLATDVTCVGPGAHKGQSVISLDLYTCELDLTN

SEQ ID NO: 3062 - protein, 827 aa, synthetic construct
  REGION 1..827: note = TLR8 (Q9NR97) SP+PP+ECD
MENMFLQSSMLTCIFLLISGSCELCAEENFSRSYPCDEKKQNDSVIAECSNRRLQEVPQTVGKYVTELDLSDNFITHITNESFQGLQNLTKINLNHNPNVQHQNGNPGIQSNGLNITDGAFLNLKNLRELLLEDNQLPQIPSGLPESLTELSLIQNNIYNITKEGISRLINLKNLYLAWNCYFNKVCEKTNIEDGVFETLTNLELLSLSFNSLSHVPPKLPSSLRKLFLSNTQIKYISEEDFKGLINLTLLDLSGNCPRCFNAPFPCVPCDGGASINIDRFAFQNLTQLRYLNLSSTSLRKINAAWFKNMPHLKVLDLEFNYLVGEIASGAFLTMLPRLEILDLSFNYIKGSYPQHINISRNFSKLLSLRALHLRGYVFQELREDDFQPLMQLPNLSTINLGINFIKQIDFKLFQNFSNLEIIYLSENRISPLVKDTRQSYANSSSFQRHIRKRRSTDFEFDPHSNFYHFTRPLIKPQCAAYGKALDLSLNSIFFIGPNQFENLPDIACLNLSANSNAQVLSGTEFSAIPHVKYLDLTNNRLDFDNASALTELSDLEVLDLSYNSHYFRIAGVTHHLEFIQNFTNLKVLNLSHNNIYTLTDKYNLESKSLVELVFSGNRLDILWNDDDNRYISIFKGLKNLTRLDLSLNRLKHIPNEAFLNLPASLTELHINDNMLKFFNWTLLQQFPRLELLDLRGNKLLFLTDSLSDFTSSLRTLLLSHNRISHLPSGFLSEVSSLKHLDLSSNLLKTINKSALETKTTTKLSMLELHGNPFECTCDIGDFRRWMDEHLNVKIPRLVDVICASPGDQRGKSIVSLELTTCVSDVT

SEQ ID NO: 3063 - protein, 818 aa, synthetic construct
  REGION 1..818: note = TLR9 (Q9NR96) SP+PP+ECD
MGFCRSALHPLSLLVQAIMLAMTLALGTLPAFLPCELQPHGLVNCNWLFLKSVPHFSMAAPRGNVTSLSLSSNRIHHLHDSDFAHLPSLRHLNLKWNCPPVGLSPMHFPCHMTIEPSTFLAVPTLEELNLSYNNIMTVPALPKSLISLSLSHTNILMLDSASLAGLHALRFLFMDGNCYYKNPCRQALEVAPGALLGLGNLTHLSLKYNNLTVVPRNLPSSLEYLLLSYNRIVKLAPEDLANLTALRVLDVGGNCRRCDHAPNPCMECPRHFPQLHPDTFSHLSRLEGLVLKDSSLSWLNASWFRGLGNLRVLDLSENFLYKCITKTKAFQGLTQLRKLNLSFNYQKRVSFAHLSLAPSFGSLVALKELDMHGIFFRSLDETTLRPLARLPMLQTLRLQMNFINQAQLGIFRAFPGLRYVDLSDNRISGASELTATMGEADGGEKVWLQPGDLAPAPVDTPSSEDFRPNCSTLNFTLDLSRNNLVTVQPEMFAQLSHLQCLRLSHNCISQAVNGSQFLPLTGLQVLDLSHNKLDLYHEHSFTELPRLEALDLSYNSQPFGMQGVGHNFSFVAHLRTLRHLSLAHNNIHSQVSQQLCSTSLRALDFSGNALGHMWAEGDLYLHFFQGLSGLIWLDLSQNRLHTLLPQTLRNLPKSLQVLRLRDNYLAFFKWWSLHFLPKLEVLDLAGNQLKALTNGSLPAGTRLRRLDVSCNSISFVAPGFFSKAKELRELNLSANALKTVDHSWFGPLASALQILDVSANPLHCACGAAFMDFLLEVQAAVPGLPSRVKCGSPGQLQGLSIFAQDLRLCLDEALSWDC

SEQ ID NO: 3064 - protein, 187 aa, synthetic construct
  REGION 1..187: note = TMED7 (Q9Y3B3) SP+PP+ECD
MPRPGSAQRWAAVAGRWGCRLLALLLLVPGPGGASEITFELPDNAKQCFYEDIAQGTKCTLEFQVITGGHYDVDCRLEDPDGKVLYKEMKKQYDSFTFTASKNGTYKFCFSNEFSTFTHKTVYFDFQVGEDPPLFPSENRVSALTQMESACVSIHEALKSVIDYQTHFRLREAQGRSRAEDLNTRVA

SEQ ID NO: 3065 - protein, 330 aa, synthetic construct
  REGION 1..330: note = TMEFF1 (Q8IYR6) SP+PP+ECD
MGAAAAEAPLRLPAAPPLAFCCYTSVLLLFAFSLPGSRASNQPPGGGGGSGGDCPGGKGKSINCSELNVRESDVRVCDESSCKYGGVCKEDGDGLKCACQFQCHTNYIPVCGSNGDTYQNECFLRRAACKHQKEITVIARGPCYSDNGSGSGEGEEEGSGAEVHRKHSKCGPCKYKAECDEDAENVGCVCNIDCSGYSFNPVCASDGSSYNNPCFVREASCIKQEQIDIRHLGHCTDTDDTSLLGKKDDGLQYRPDVKDASDQREDVYIGNHMPCPENLNGYCIHGKCEFIYSTQKASCRCESGYTGQHCEKTDFSILYVVPSRQKLTHV

SEQ ID NO: 3066 - protein, 320 aa, synthetic construct
  REGION 1..320: note = TMEFF2 (Q9UIK5) SP+PP+ECD
MVLWESPRQCSSWTLCEGFCWLLLLPVMLLIVARPVKLAAFPTSLSDCQTPTGWNCSGYDDRENDLFLCDTNTCKFDGECLRIGDTVTCVCQFKCNNDYVPVCGSNGESYQNECYLRQAACKQQSEILVVSEGSCATDAGSGSGDGVHEGSGETSQKETSTCDICQFGAECDEDAEDVWCVCNIDCSQTNFNPLCASDGKSYDNACQIKEASCQKQEKIEVMSLGRCQDNTTTTTKSEDGHYARTDYAENANKLEESAREHHIPCPEHYNGFCMHGKCEHSINMQEPSCRCDAGYTGQHCEKKDYSVLYVVPGPVRFQYV

SEQ ID NO: 3067 - protein, 468 aa, synthetic construct
  REGION 1..468: note = TMEM108 (Q6UXF1) SP+PP+ECD
MKRSLQALYCQLLSFLLILALTEALAFAIQEPSPRESLQVLPSGTPPGTMVTAPHSSTRHTSVVMLTPNPDGPPSQAAAPMATPTPRAEGHPPTHTISTIAATVTAPHSESSLSTGPAPAAMATTSSKPEGRPRGQAAPTILLTKPPGATSRPTTAPPRTTTRRPPRPPGSSRKGAGNSSRPVPPAPGGHSRSKEGQRGRNPSSTPLGQKRPLGKIFQIYKGNFTGSVEPEPSTLTPRTPLWGYSSSPQPQTVAATTVPSNTSWAPTTTSLGPAKDKPGLRRAAQGGGSTFTSQGGTPDATAASGAPVSPQAAPVPSQRPHHGDPQDGPSHSDSWLTVTPGTSRPLSTSSGVFTAATGPTPAAFDTSVSAPSQGIPQGASTTPQAPTHPSRVSESTISGAKEETVATLTMTDRVPSPLSTVVSTATGNFLNRLVPAGTWKPGTAGNISHVAEGDKPQHRATICLSKMD

SEQ ID NO: 3068 - protein, 166 aa, synthetic construct
  REGION 1..166: note = TMEM123 (Q8N131) SP+PP+ECD
MGLGARGAWAALLLGTLQVLALLGAAHESAAMAASANIENSGLPHNSSANSTETLQHVPSDHTNETSNSTVKPPTSVASDSSNTTVTTMKPTAASNTTTPGMVSTNMTSTTLKSTPKTTSVSQNTSQISTSTMTVTHNSSVTSAASSVTITTTMHSEAKKGSKFDT

SEQ ID NO: 3069 - protein, 852 aa, synthetic construct
  REGION 1..852: note = TMEM132A (Q24JP5) SP+PP+ECD
MCARMAGRTTAAPRGPYGPWLCLLVALALDVVRVDCGQAPLDPVYLPAALELLDAPEHFRVQQVGHYPPANSSLSSRSETFLLLQPWPRAQPLLRASYPPFATQQVVPPRVTEPHQRPVPWDVRAVSVEAAVTPAEPYARVLFHLKGQDWPPGSGSLPCARLHATHPAGTAHQACRFQPSLGACVVELELPSHWFSQASTTRAELAYTLEPAAEGPGGCGSGEENDPGEQALPVGGVELRPADPPQYQEVPLDEAVTLRVPDMPVRPGQLFSATLLLRHNFTASLLTLRIKVKKGLHVTAARPAQPTLWTAKLDRFKGSRHHTTLITCHRAGLTEPDSSPLELSEFLWVDFVVENSTGGGVAVTRPVTWQLEYPGQAPEAEKDKMVWEILVSERDIRALIPLAKAEELVNTAPLTGVPQHVPVRLVTVDGGGALVEVTEHVGCESANTQVLQVSEACDAVFVAGKESRGARGVRVDFWWRRLRASLRLTVWAPLLPLRIELTDTTLEQVRGWRVPGPAEGPAEPAAEASDEAERRARGCHLQYQRAGVRFLAPFAAHPLDGGRRLTHLLGPDWLLDVSHLVAPHARVLDSRVASLEGGRVVVGREPGVTSIEVRSPLSDSILGEQALAVTDDKVSVLELRVQPVMGISLTLSRGTAHPGEVTATCWAQSALPAPKQEVALSLWLSFSDHTVAPAELYDRRDLGLSVSAEEPGAILPAEEQGAQLGVVVSGAGAEGLPLHVALHPPEPCRRGRHRVPLASGTAWLGLPPASTPAPALPSSPAWSPPATEATMGGKRQVAGSVGGNTGVRGKFERAEEEARKEETEAREEEEEEEEEMVPAPQHVTELELGMYA

SEQ ID NO: 3070 - protein, 922 aa, synthetic construct
  REGION 1..922: note = TMEM132C (Q8N3T6) SP+PP+ECD
MRSEGAAPGPAAPLCGALSLLLGALLGKVIEGHGVTDNIQRFSSLPPYLPVSYHILRAETSFFLKEANQDLLRNSSLQARVESFFTYKTRQPPVLNASYGPFSVEKVVPLDLMLTSNFLGPTNKFSFDWKLKAHILRDKVYLSRPKVQVLFHIMGRDWDDHGAGEKLPCLRVFAFRETREVRGSCRLKGDLGLCVAELELLSSWFSAPTVGAGRKKSMDQPEGTPVELYYTVHPGNERGDCAGGDFRKGNAIRPGKDGLEETTSHLQRIGTVGLYRAQDSAQLSELRLDGNVVIWLPSRPVKQGEVVTAYVTISSNSSVDLFILRAKVKKGVNILSAQTREPRQWGVKQEVGSGGKHVTATVACQRLGPSPRNRSSSLFNEVVQMNFEIASFSSLSGTQPITWQVEYPRKGTTDIAVSEIFVSQKDLVGIVPLAMDTEILNTAVLTGKTVAMPIKVVSVEENSAVMDISESVECKSTDEDVIKVSERCDYIFVNGKEIKGKMDAVVNFTYQYLSAPLCVTVWVPRLPLQIEVSDTELSQIKGWRVPIVTNKRPTRESEDEDEEERRGRGCALQYQHATVRVLTQFVSEGAGPWGQPNYLLSPNWQFDITHLVADFMKLEEPHVATLQDSRVLVGREVGMTTIQVLSPLSDSILAEKTITVLDDKVSVTDLAIQLVAGLSVALYPNAENSKAVTAVVTAEEVLRTPKQEAVFSTWLQFSDGSVTPLDIYDTKDFSLAATSQDEAVVSVPQPRSPRWPVVVAEGEGQGPLIRVDMTIAEACQKSKRKSILAVGVGNVRVKFGQNDADSSPGGDYEEDEIKNHASDRRQKGQHHERTGQDGHLYGSSPVEREEGALRRATTTARSLLDNKVVKNSRADGGRLAGEGQLQNIPIDFTNFPAHVDLPKAGSGLEENDLVQTPRGLSD

SEQ ID NO: 3071 - protein, 915 aa, synthetic construct
  REGION 1..915: note = TMEM132D (Q14C87) SP+PP+ECD
MCPSEMGTLWHHWSPVLISLAALFSKVTEGRGILESIQRFSLLPTYLPVTYHINNADVSFFLKEANQDIMRNSSLQSRVESFLIYKSRRLPVLNASYGPFSIEQVVPQDLMLPSNPFGFTNKFSLNWKLKAHILRDKVYLSRPKVQVLFHIMGRDWDDRSAGEKLPCLRVFAFRETREVRGSCRLQGDLGLCVAELELLSSWFSPPTVVAGRRKSVDQPEGTPVELYYTVHPGGERGDCVREDARRSNGIRTGHSDIDESGPPLQRIGSIFLYQTHRKPSLRELRLDNSVAIHYIPKTVRKGDVLTFPVSISRNSTEDRFTLRAKVKKGVNIIGVRASSPSIWDVKERTDYTGKYAPAVIVCQKKAAGSENSADGASYEVMQIDVEVEEPGDLPATQLVTWQVEYPGEITSDLGVSKIYVSPKDLIGVVPLAMEAEILNTAILTGKTVAVPVKVVSVEDDGTVTELLESVECRSSDEDVIKVSDRCDYVFVNGKEMKGKVNVVVNFTYQHLSSPLEMTVWVPRLPLQIEVSDTELNQIKGWRVPIVSSRRPAGDSEEEEDDERRGRGCTLQYQHAMVRVLTQFVAEAAGPGGHLAHLLGSDWQVDITELINDFMQVEEPRIAKLQGGQILMGQELGMTTIQILSPLSDTILAEKTITVLDEKVTITDLGVQLVTGLSLSLQLSPGSNRAIFATAVAQELLQRPKQEAAISCWVQFSDGSVTPLDIYDGKDFSLMATSLDEKVVSIHQDPKFKWPIIAAETEGQGTLVKVEMVISESCQKSKRKSVLAVGTANIKVKFGQNDANPNTSDSRHTGAGVHMENNVSDRRPKKPSQEWGSQEGQYYGSSSMGLMEGRGTTTDRSILQKKKGQESLLDDNSHLQTIPSDLTSFPAQVDLPRSNGEMDGNDLMQASKGLSD

SEQ ID NO: 3072 - protein, 893 aa, synthetic construct
  REGION 1..893: note = TMEM132E (Q6IEE7) SP+PP+ECD
MAPGMSGRGGAALLCLSALLAHASGRSHPASPSPPGPQASPVLPVSYRLSHTRLAFFLREARPPSPAVANSSLQRSEPFVVFQTKELPVLNVSLGPFSTSQVVARELLQPSSTLDIPERLTVNWKVRAFIVRSHVPASQPVVQVLFYVAGRDWDDFGVTERLPCVRLHAFRDAREVKSSCRLSGGLATCLVRAELPLAWFGPPAPAAPPTARRKSPDGLEPEATGESQQAELYYTLHAPDASGGCGGSRRGAGPGVGARAESPTQHPLLRIGSISLFRPPPRRTLQEHRLDSNLMIRLPDRPLKPGEVLSILLYLAPNSSSPSSPSVEHFTLRVKAKKGVTLLGTKSRSGQWHVTSELLTGAKHSTATVDVAWAQSTPLPPREGQGPLEILQLDFEMENFTSQSVKRRIMWHIDYRGHGALPDLERAVTELTVIQRDVQAILPLAMDTEIINTAILTGRTVAIPVKVIAIEVNGLVLDISALVECESDNEDIIKVSSSCDYVFVSGKESRGSMNARVTFRYDVLNAPLEMTVWVPKLPLHIELSDARLSQVKGWRVPILPDRRSVRESEDEDEEEEERRQSASRGCTLQYQHATLQVFTQFHTTSSEGTDQVVTMLGPDWLVEVTDLVSDFMRVGDPRVAHMVDSSTLAGLEPGTTPFKVVSPLTEAVLGETLLTVTEEKVSITQLQAQVVASLALSLRPSPGSSHTILATTAAQQTLSFLKQEALLSLWLSYSDGTTAPLSLYSPRDYGLLVSSLDEHVATVTQDRAFPLVVAEAEGSGELLRAELTIAESCQKTKRKSVLATTPVGLRVHFGRDEEDPTYDYPGPSQPGPGGGEDEARGAGPPGSALPAPEAPGPGTASPVVPPTEDFLPLPTGFLQVPRGLTDLEIGMYA

SEQ ID NO: 3073 - protein, 75 aa, synthetic construct
  REGION 1..75: note = TMEM154 (Q6P9G4) SP+PP+ECD
MQAPRAALVFALVIALVPVGRGNYEELENSGDTTVESERPNKVTIPSTFAAVTIKETLNANINSTNFAPDENQLE

SEQ ID NO: 3074 - protein, 230 aa, synthetic construct
  REGION 1..230: note = TMEM158 (Q8WZ71) SP+PP+ECD
MLPLLAALLAAACPLPPVRGGAADAPGLLGVPSNASVNASSADEPIAPRLLASAAPGPPERPGPEEAAAAAAPCNISVQRQMLSSLLVRWGRPRGFQCDLLLFSTNAHGRAFFAAAFHRVGPPLLIEHLGLAAGGAQQDLRLCVGCGWVRGRRTGRLRPAAAPSAAAATAGAPTALPAYPAAEPPGPLWLQGEPLHFCCLDFSLEELQGEPGWRLNRKPIESTLVACFMT

SEQ ID NO: 3075 - protein, 70 aa, synthetic construct
  REGION 1..70: note = TMEM213 (A2RRL7) SP+PP+ECD
MQRLPAATRATLILSLAFASLHSACSAEASSSNSSSLTAHHPDPGTLEQCLNVDFCPQAARCCRTGVDEY

SEQ ID NO: 3076 - protein, 204 aa, synthetic construct
  REGION 1..204: note = TMEM219 (Q86XT9) SP+PP+ECD
MGNCQAGHNLHLCLAHHPPLVCATLILLLLGLSGLGLGSFLLTHRTGLRSPDIPQDWVSFLRSFGQLTLCPRNGTVTGKWRGSHVVGLLTTLNFGDGPDRNKTRTFQATVLGSQMGLKGSSAGQLVLITARVTTERTAGTCLYFSAVPGILPSSQPPISCSEEGAGNATLSPRMGEECVSVWSHEGLVLTKLLTSEELALCGSR

SEQ ID NO: 3077 - protein, 232 aa, synthetic construct
  REGION 1..232: note = TMEM25 (Q86YD3) SP+PP+ECD
MALPPGPAALRHTLLLLPALLSSGWGELEPQIDGQTWAERALRENERHAFTCRVAGGPGTPRLAWYLDGQLQEASTSRLLSVGGEAFSGGTSTFTVTAHRAQHELNCSLQDPRSGRSANASVILNVQFKPEIAQVGAKYQEAQGPGLLVVLFALVRANPPANVTWIDQDGPVTVNTSDFLVLDAQNYPWLTNHTVQLQLRSLAHNLSVVATNDVGVTSASLPAPGLLATRVE

SEQ ID NO: 3078 - protein, 141 aa, synthetic construct
  REGION 1..141: note = TMEM27 (Q9HBJ8) SP+PP+ECD
MLWLLFFLVTAIHAELCQPGAENAFKVRLSIRTALGDKAYAWDTNEEYLFKAMVAFSMRKVPNREATEISHVLLCNVTQRVSFWFVVTDPSKNHTLPAVEVQSAIRMNKNRINNAFFLNDQTLEFLKIPSTLAPPMDPSVP

SEQ ID NO: 3079 - protein, 89 aa, synthetic construct
  REGION 1..89: note = TMEM9 (Q9P0T7) SP+PP+ECD
MKLLSLVAVVGCLLVPPAEANKSSEDIRCKCICPPYRNISGHIYNQNVSQKDCNCLHVVEPMPVPGHDVEAYCLLCECRYEERSTTTIK

SEQ ID NO: 3080 - protein, 145 aa, synthetic construct
  REGION 1..145: note = TMEM95 (Q3KNT9) SP+PP+ECD
MWRLALGGVFLAAAQACVFCRLPAHDLSGRLARLCSQMEARQKECGASPDFSAFALDEVSMNKVTEKTHRVLRVMEIKEAVSSLPSYWSWLRKTKLPEYTREALCPPACRGSTTLYNCSTCKGTEVSCWPRKRCFPGSQDLWEAK

SEQ ID NO: 3081 - protein, 104 aa, synthetic construct
  REGION 1..104: note = TMEM9B (Q9NQ34) SP+PP+ECD
MATLWGGLLRLGSLLSLSCLALSVLLLAQLSDAAKNFEDVRCKCICPPYKENSGHIYNKNISQKDCDCLHVVEPMPVRGPDVEAYCLRCECKYEERSSVTIKVT

SEQ ID NO: 3082 - protein, 220 aa, synthetic construct
  REGION 1..220: note = TMIGD1 (Q6UXZ0) SP+PP+ECD
MAWKSSVIMQMGRFLLLVILFLPREMTSSVLTVNGKTENYILDTTPGSQASLICAVQNHTREEELLWYREEGRVDLKSGNKINSSSVCVSSISENDNGISFTCRLGRDQSVSVSVVLNVTFPPLLSGNDFQTVEEGSNVKLVCNVKANPQAQMMWYKNSSLLDLEKSRHQIQQTSESFQLSITKVEKPDNGTYSCIAKSSLKTESLDFHLIVKDKTVGVP

SEQ ID NO: 3083 - protein, 150 aa, synthetic construct
  REGION 1..150: note = TMIGD2 (Q96BF3) SP+PP+ECD
MGSPGMVLGLLVQIWALQEASSLSVQQGPNLLQVRQGSQATLVCQVDQATAWERLRVKWTKDGAILCQPYITNGSLSLGVCGPQGRLSWQAPSHLTLQLDPVSLNHSGAYVCWAAVEIPELEEAEGNITRLFVDPDDPTQNRNRIASFPG

SEQ ID NO: 3084 - protein, 375 aa, synthetic construct
  REGION 1..375: note = TMX3 (Q96JJ7) SP+PP+ECD
MAAWKSWTALRLCATVVVLDMVVCKGFVEDLDESFKENRNDDIWLVDFYAPWCGHCKKLEPIWNEVGLEMKSIGSPVKVGKMDATSYSSIASEFGVRGYPTIKLLKGDLAYNYRGPRTKDDIIEFAHRVSGALIRPLPSQQMFEHMQKRHRVFFVYVGGESPLKEKYIDAASELIVYTYFFSASEEVVPEYVTLKEMPAVLVFKDETYFVYDEYEDGDLSSWINRERFQNYLAMDGFLLYELGDTGKLVALAVIDEKNTSVEHTRLKSIIQEVARDYRDLFHRDFQFGHMDGNDYINTLLMDELTVPTVVVLNTSNQQYFLLDRQIKNVEDMVQFINNILDGTVEAQGGDSILQRLKRIVFDAKSTIVSIFKSSP

SEQ ID NO: 3085 - protein, 189 aa, synthetic construct
  REGION 1..189: note = TMX4 (Q9H1E5) SP+PP+ECD
MAGGRCGPQLTALLAAWIAAVAATAGPEEAALPPEQSRVQPMTASNWTLVMEGEWMLKFYAPWCPSCQQTDSEWEAFAKNGEILQISVGKVDVIQEPGLSGRFFVTTLPAFFHAKDGIFRRYRGPGIFEDLQNYILEKKWQSVEPLTGWKSPASLTMSGMAGLFSISGKIWHLHNYFTVTLGIPAWCSY

SEQ ID NO: 3086 - protein, 239 aa, synthetic construct
  REGION 1..239: note = TNFRSF10A (O00220) SP+PP+ECD
MAPPPARVHLGAFLAVTPNPGSAASGTEAAAATPSKVWGSSAGRIEPRGGGRGALPTSMGQHGPSARARAGRAPGPRPAREASPRLRVHKTFKFVVVGVLLQVVPSSAATIKLHDQSIGTQQWEHSPLGELCPPGSHRSEHPGACNRCTEGVGYTNASNNLFACLPCTACKSDEEERSPCTTTRNTACQCKPGTFRNDNSAEMCRKCSRGCPRGMVKVKDCTPWSDIECVHKESGNGHN

SEQ ID NO: 3087 - protein, 211 aa, synthetic construct
  REGION 1..211: note = TNFRSF10D (Q9UBN6) SP+PP+ECD
MGLWGQSVPTASSARAGRYPGARTASGTRPWLLDPKILKFVVFIVAVLLPVRVDSATIPRQDEVPQQTVAPQQQRRSLKEEECPAGSHRSEYTGACNPCTEGVDYTIASNNLPSCLLCTVCKSGQTNKSSCTTTRDTVCQCEKGSFQDKNSPEMCRTCRTGCPRGMVKVSNCTPRSDIKCKNESAASSTGKTPAAEETVTTILGMLASPYH

SEQ ID NO: 3088 - protein, 212 aa, synthetic construct
  REGION 1..212: note = TNFRSF11A (Q9Y6Q6) SP+PP+ECD
MAPRARRRRPLFALLLLCALLARLQVALQIAPPCTSEKHYEHLGRCCNKCEPGKYMSSKCTTTSDSVCLPCGPDEYLDSWNEEDKCLLHKVCDTGKALVAVVAGNSTTPRRCACTAGYHWSQDCECCRRNTECAPGLGAQHPLQLNKDTVCKPCLAGYFSDAFSSTDKCRPWTNCTFLGKRVEHHGTEKSDAVCSSSLPARKPPNEPHVYLP

SEQ ID NO: 3089 - protein, 202 aa, synthetic construct
  REGION 1..202: note = TNFRSF14 (Q92956) SP+PP+ECD
MEPPGDWGPPPWRSTPKTDVLRLVLYLTFLGAPCYAPALPSCKEDEYPVGSECCPKCSPGYRVKEACGELTGTVCEPCPPGTYIAHLNGLSKCLQCQMCDPAMGLRASRNCSRTENAVCGCSPGHFCIVQDGDHCAACRAYATSSPGQRVQKGGTESQDTLCQNCPPGTFSPNGTLEECQHQTKCSWLVTKAGAGTSSSHWV

SEQ ID NO: 3090 - protein, 162 aa, synthetic construct
  REGION 1..162: note = TNFRSF18 (Q9Y5U5) SP+PP+ECD
MAQHGAMGAFRALCGLALLCALSLGQRPTGGPGCGPGRLLLGTGTDARCCRVHTTRCCRDYPGEECCSEWDCMCVQPEFHCGDPCCTTCRHHPCPPGQGVQSQGKFSFGFQCIDCASGTFSGGHEGHCKPWTDCTQFGFLTVFPGNKTHNAVCVPGSPPAEP

SEQ ID NO: 3091 - protein, 170 aa, synthetic construct
  REGION 1..170: note = TNFRSF19 (Q9NS68) SP+PP+ECD
MALKVLLEQEKTFFTLLVLLGYLSCKVTCESGDCRQQEFRDRSGNCVPCNQCGPGMELSKECGFGYGEDAQCVTCRLHRFKEDWGFQKCKPCLDCAVVNRFQKANCSATSDAICGDCLPGFYRKTKLVGFQDMECVPCGDPPPPYEPHCASKVNLVKIASTASSPRDTAL

SEQ ID NO: 3092 - protein, 211 aa, synthetic construct
  REGION 1..211: note = TNFRSF1A (P19438) SP+PP+ECD
MGLSTVPDLLLPLVLLELLVGIYPSGVIGLVPHLGDREKRDSVCPQGKYIHPQNNSICCTKCHKGTYLYNDCPGPGQDTDCRECESGSFTASENHLRHCLSCSKCRKEMGQVEISSCTVDRDTVCGCRKNQYRHYWSENLFQCFNCSLCLNGTVHLSCQEKQNTVCTCHAGFFLRENECVSCSNCKKSLECTKLCLPQIENVKGTEDSGTT

SEQ ID NO: 3093 - protein, 257 aa, synthetic construct
  REGION 1..257: note = TNFRSF1B (P20333) SP+PP+ECD
MAPVAVWAALAVGLELWAAAHALPAQVAFTPYAPEPGSTCRLREYYDQTAQMCCSKCSPGQHAKVFCTKTSDTVCDSCEDSTYTQLWNWVPECLSCGSRCSSDQVETQACTREQNRICTCRPGWYCALSKQEGCRLCAPLRKCRPGFGVARPGTETSDVVCKPCAPGTFSNTTSSTDICRPHQICNVVAIPGNASMDAVCTSTSPTRSMAPGAVHLPQPVSTRSQHTQPTPEPSTAPSTSFLLPMGPSPPAEGSTGD

SEQ ID NO: 3094 - protein, 349 aa, synthetic construct
  REGION 1..349: note = TNFRSF21 (O75509) SP+PP+ECD
MGTSPSSSTALASCSRIARRATATMIAGSLLLLGFLSTTTAQPEQKASNLIGTYRHVDRATGQVLTCDKCPAGTYVSEHCTNTSLRVCSSCPVGTFTRHENGIEKCHDCSQPCPWPMIEKLPCAALTDRECTCPPGMFQSNATCAPHTVCPVGWGVRKKGTETEDVRCKQCARGTFSDVPSSVMKCKAYTDCLSQNLVVIKPGTKETDNVCGTLPSFSSSTSPSPGTAIFPRPEHMETHEVPSSTYVPKGMNSTESNSSASVRPKVLSSIQEGTVPDNTSSARGKEDVNKTLPNLQVVNHQQGPHHRHILKLLPSMEATGGEKSSTPIKGPKRGHPRQNLHKHFDINEH

SEQ ID NO: 3095 - protein, 199 aa, synthetic construct
  REGION 1..199: note = TNFRSF25 (Q93038) SP+PP+ECD
MEQRPRGCAAVAAALLLVLLGARAQGGTRSPRCDCAGDFHKKIGLFCCRGCPAGHYLKAPCTEPCGNSTCLVCPQDTFLAWENHHNSECARCQACDEQASQVALENCSAVADTRCGCKPGWFVECQVSQCVSSSPFYCQPCLDCGALHRHTRLLCSRRDTDCGTCLPGFYEHGDGCVSCPTSTLGSCPERCAAVCGWRQ

SEQ ID NO: 3096 - protein, 214 aa, synthetic construct
  REGION 1..214: note = TNFRSF4 (P43489) SP+PP+ECD
MCVGARRLGRGPCAALLLLGLGLSTVTGLHCVGDTYPSNDRCCHECRPGNGMVSRCSRSQNTVCRPCGPGFYNDVVSSKPCKPCTWCNLRSGSERKQLCTATQDTVCRCRAGTQPLDSYKPGVDCAPCPPGHFSPGDNQACKPWTNCTLAGKHTLQPASNSSDAICEDRDPPATQPQETQGPPARPITVQPTEAWPRTSQGPSTRPVEVPGGRA

SEQ ID NO: 3097 - protein, 385 aa, synthetic construct
  REGION 1..385: note = TNFRSF8 (P28908) SP+PP+ECD
MRVLLAALGLLFLGALRAFPQDRPFEDTCHGNPSHYYDKAVRRCCYRCPMGLFPTQQCPQRPTDCRKQCEPDYYLDEADRCTACVTCSRDDLVEKTPCAWNSSRVCECRPGMFCSTSAVNSCARCFFHSVCPAGMIVKFPGTAQKNTVCEPASPGVSPACASPENCKEPSSGTIPQAKPTPVSPATSSASTMPVRGGTRLAQEAASKLTRAPDSPSSVGRPSSDPGLSPTQPCPEGSGDCRKQCEPDYYLDEAGRCTACVSCSRDDLVEKTPCAWNSSRTCECRPGMICATSATNSCARCVPYPICAAETVTKPQDMAEKDTTFEAPPLGTQPDCNPTPENGEAPASTSPTQSLLVDSQASKTLPIPTSAPVALSSTGKPVLDAG

SEQ ID NO: 3098 - protein, 186 aa, synthetic construct
  REGION 1..186: note = TNFRSF9 (Q07011) SP+PP+ECD
MGNSCYNIVATLLLVLNFERTRSLQDPCSNCPAGTFCDNNRNQICSPCPPNSFSSAGGQRTCDICRQCKGVFRTRKECSSTSNAECDCTPGFHCLGAGCSMCEQDCKQGQELTKKGCKDCCFGTFNDQKRGICRPWTNCSLDGKSVLVNGTKERDVVCGPSPADLSPGASSVTPPAPAREPGHSPQ

SEQ ID NO: 3099 - protein, 309 aa, synthetic construct
  REGION 1..309: note = TP53I13 (Q8NBR0) SP+PP+ECD
MAPPPPSPQLLLLAALARLLGPSEVMAGPAEEAGAHCPESLWPLPPQVSPRVTYTRVSPGQAEDVTFLYHPCAHPWLKLQLALLAYACMANPSLTPDFSLTQDRPLVLTAWGLALEMAWVEPAWAAHWLMRRRRRKQRKKKAWIYCESLSGPAPSEPTPGRGRLCRRGCVQALALAFALRSWRPPGTEVTSQGPRQPSSSGAKRRRLRAALGPQPTRSALRFPSASPGSLKAKQSMAGIPGRESNAPSVPTVSLLPGAPGGNASSRTEAQVPNGQGSPGGCVCSSQASPAPRAAAPPRAARGPTPRTEE

SEQ ID NO: 3100 - protein, 355 aa, synthetic construct
  REGION 1..355: note = TPBG (Q13641) SP+PP+ECD
MPGGCSRGPAAGDGRLRLARLALVLLGWVSSSSPTSSASSFSSSAPFLASAVSAQPPLPDQCPALCECSEAARTVKCVNRNLTEVPTDLPAYVRNLFLTGNQLAVLPAGAFARRPPLAELAALNLSGSRLDEVRAGAFEHLPSLRQLDLSHNPLADLSPFAFSGSNASVSAPSPLVELILNHIVPPEDERQNRSFEGMVVAALLAGRALQGLRRLELASNHFLYLPRDVLAQLPSLRHLDLSNNSLVSLTYVSFRNLTHLESLHLEDNALKVLHNGTLAELQGLPHIRVFLDNNPWVCDCHMADMVTWLKETEVVQGKDRLTCAYPEKMRNRVLLELNSADLDCDPILPPSLQTS

SEQ ID NO: 3101 - protein, 307 aa, synthetic construct
  REGION 1..307: note = TPBGL (P0DKB5) SP+PP+ECD
MAPRAGQPGLQGLLLVAAALSQPAAPCPFQCYCFGGPKLLLRCASGAELRQPPRDVPPDARNLTIVGANLTVLRAAAFAGGDGDGDQAAGVRLPLLSALRLTHNHIEVVEDGAFDGLPSLAALDLSHNPLRALGGGAFRGLPALRSLQLNHALVRGGPALLAALDAALAPLAELRLLGLAGNALSRLPPAALRLARLEQLDVRLNALAGLDPDELRALERDGGLPGPRLLLADNPLRCGCAARPLLAWLRNATERVPDSRRLRCAAPRALLDRPLLDLDGARLRCADSGADARGEEAEAAGPELEAS

SEQ ID NO: 3102 - protein, 846 aa, synthetic construct
  REGION 1..846: note = TPO (P07202) SP+PP+ECD
MRALAVLSVTLVMACTEAFFPFISRGKELLWGKPEESRVSSVLEESKRLVDTAMYATMQRNLKKRGILSPAQLLSFSKLPEPTSGVIARAAEIMETSIQAMKRKVNLKTQQSQHPTDALSEDLLSIIANMSGCLPYMLPPKCPNTCLANKYRPITGACNNRDHPRWGASNTALARWLPPVYEDGFSQPRGWNPGFLYNGFPLPPVREVTRHVIQVSNEVVTDDDRYSDLLMAWGQYIDHDIAFTPQSTSKAAFGGGADCQMTCENQNPCFPIQLPEEARPAAGTACLPFYRSSAACGTGDQGALFGNLSTANPRQQMNGLTSFLDASTVYGSSPALERQLRNWTSAEGLLRVHARLRDSGRAYLPFVPPRAPAACAPEPGIPGETRGPCFLAGDGRASEVPSLTALHTLWLREHNRLAAALKALNAHWSADAVYQEARKVVGALHQIITLRDYIPRILGPEAFQQYVGPYEGYDSTANPTVSNVFSTAAFRFGHATIHPLVRRLDASFQEHPDLPGLWLHQAFFSPWTLLRGGGLDPLIRGLLARPAKLQVQDQLMNEELTERLFVLSNSSTLDLASINLQRGRDHGLPGYNEWREFCGLPRLETPADLSTAIASRSVADKILDLYKHPDNIDVWLGGLAENFLPRARTGPLFACLIGKQMKALRDGDWFWWENSHVFTDAQRRELEKHSLSRVICDNTGLTRVPMDAFQVGKFPEDFESCDSITGMNLEAWRETFPQDDKCGFPESVENGDFVHCEESGRRVLVYSCRHGYELQGREQLTCTQEGWDFQPPLCKDVNECADGAHPPCHASARCRNTKGGFQCLCADPYELGDDGRTCVDSGRLPR

SEQ ID NO: 3103 - protein, 283 aa, synthetic construct
  REGION 1..283: note = TPSG1 (Q9NRR2) SP+PP+ECD
MALGACGLLLLLAVPGVSLRTLQPGCGRPQVSDAGGRIVGGHAAPAGAWPWQASLRLRRMHVCGGSLLSPQWVLTAAHCFSGSLNSSDYQVHLGELEITLSPHFSTVRQIILHSSPSGQPGTSGDIALVELSVPVTLSSRILPVCLPEASDDFCPGIRCWVTGWGYTREGEPLPPPYSLREVKVSVVDTETCRRDYPGPGGSILQPDMLCARGPGDACQDDSGGPLVCQVNGAWVQAGTVSWGEGCGRPNRPGVYTRVPAYVNWIRRHITASGGSESGYPRLP

SEQ ID NO: 3104 - protein, 477 aa, synthetic construct
  REGION 1..477: note = TRABD2A (Q86V40) SP+PP+ECD
MSPWSWFLLQTLCLLPTGAASRRGAPGTANCELKPQQSELNSFLWTIKRDPPSYFFGTIHVPYTRVWDFIPDNSKEAFLQSSIVYFELDLTDPYTISALTSCQMLPQGENLQDVLPRDIYCRLKRHLEYVKLMMPLWMTPDQRGKGLYADYLFNAIAGNWERKRPVWVMLMVNSLTEVDIKSRGVPVLDLFLAQEAERLRKQTGAVEKVEEQCHPLNGLNFSQVIFALNQTLLQQESLRAGSLQIPYTTEDLIKHYNCGDLSSVILSHDSSQVPNFINATLPPQERITAQEIDSYLRRELIYKRNERIGKRVKALLEEFPDKGFFFAFGAGHFMGNNTVLDVLRREGYEVEHAPAGRPIHKGKSKKTSTRPTLSTIFAPKVPTLEVPAPEAVSSGHSTLPPLVSRPGSADTPSEAEQRFRKKRRRSQRRPRLRQFSDLWVRLEESDIVPQLQVPVLDRHISTELRLPRRGHSHHSQM

SEQ ID NO: 3105 - protein, 494 aa, synthetic construct
  REGION 1..494: note = TRABD2B (A6NFA1) SP+PP+ECD
MHAALAGPLLAALLATARARPQPPDGGQCRPPGSQRDLNSFLWTIRRDPPAYLFGTIHVPYTRVWDFIPDNSKAAFQASTRVYFELDLTDPYTISALASCQLLPHGENLQDVLPHELYWRLKRHLDYVKLMMPSWMTPAQRGKGLYADYLFNAIAGNWERKRPVWVMLMVNSLTERDVRFRGVPVLDLYLAQQAEKMKKTTGAVEQVEEQCHPLNNGLNFSQVLFALNQTLLQQESVRAGSLQASYTTEDLIKHYNCGDLSAVIFNHDTSQLPNFINTTLPPHEQVTAQEIDSYFRQELIYKRNERMGKRVMALLRENEDKICFFAFGAGHFLGNNTVIDILRQAGLEVDHTPAGQAIHSPAPQSPAPSPEGTSTSPAPVTPAAAVPEAPSVTPTAPPEDEDPALSPHLLLPDSLSQLEEFGRQRKWHKRQSTHQRPRQFNDLWVRIEDSTTASPPPLPLQPTHSSGTAKPPFQLSDQLQQQDPPGPASSSAPT

SEQ ID NO: 3106 - protein, 205 aa, synthetic construct
  REGION 1..205: note = TREM1 (Q9NP99) SP+PP+ECD
MRKTRLWGLLWMLFVSELRAATKLTEEKYELKEGQTLDVKCDYTLEKFASSQKAWQIIRDGEMPKTLACTERPSKNSHPVQVGRIILEDYHDHGLLRVRMVNLQVEDSGLYQCVIYQPPKEPHMLFDRIRLVVTKGFSGTPGSNENSTQNVYKIPPTTTKALCPLYTSPRTVTQAPPKSTADVSTPDSEINLTNVTDIIRVPVFN

SEQ ID NO: 3107 - protein, 174 aa, synthetic construct
  REGION 1..174: note = TREM2 (Q9NZC2) SP+PP+ECD
MEPLRLLILLFVTELSGAHNTTVFQGVAGQSLQVSCPYDSMKHWGRRKAWCRQLGEKGPCQRVVSTHNLWLLSFLRRWNGSTAITDDTLGGTLTITLRNLQPHDAGLYQCQSLHGSEADTLRKVLVEVLADPLDHRDAGDLWFPGESESFEDAHVEHSISRSLLEGEIPFPPTS

SEQ ID NO: 3108 - protein, 268 aa, synthetic construct
  REGION 1..268: note = TREML2 (Q5T2D2) SP+PP+ECD
MAPAFLLLLLLWPQGCVSGPSADSVYTKVRLLEGETLSVQCSYKGYKNRVEGKVWCKIRKKKCEPGFARVWVKGPRYLLQDDAQAKVVNITMVALKLQDSGRYWCMRNTSGILYPLMGFQLDVSPAPQTERNIPFTHLDNILKSGTVTTGQAPTSGPDAPFTTGVMVFTPGLITLPRLLASTRPASKTGYSFTATSTTSQGPRRTMGSQTVTASPSNARDSSAGPESISTKSGDLSTRSPTTGLCLTSRSLLNRLPSMPSIRHQDVYS

SEQ ID NO: 3109 - protein, 696 aa, synthetic construct
  REGION 1..696: note = TRIL (Q7L0X0) SP+PP+ECD
MEAARALRLLLVVCGCLALPPLAEPVCPERCDCQHPQHLLCTNRGLRVVPKTSSLPSPHDVLTYSLGGNFITNITAFDFHRLGQLRRLDLQYNQIRSLHPKTFEKLSRLEELYLGNNLLQALAPGTLAPLRKLRILYANGNEISRLSRGSFEGLESLVKLRLDGNALGALPDAVFAPLGNLLYLHLESNRIRFLGKNAFAQLGKLRFLNLSANELQPSLRHAATFAPLRSLSSLILSANNLQHLGPRIFQHLPRLGLLSLRGNQLTHLAPEAFWGLEALRELRLEGNRLSQLPTALLEPLHSLEALDLSGNELSALHPATFGHLGRLRELSLRNNALSALSGDIFAASPALYRLDLDGNGWTCDCRLRGLKRWMGDWHSQGRLLTVFVQCRHPPALRGKYLDYLDDQQLQNGSCADPSPSASLTADRRRQPLPTAAGEEMTPPAGLAEELPPQPQLQQQGRFLAGVAWDGAARELVGNRSALRLSRRGPGLQQPSPSVAAAAGPAPQSLDLHKKPQRGRPTRADPALAEPTPTASPGSAPSPAGDPWQRATKHRLGTEHQERAAQSDGGAGLPPLVSDPCDFNKFILCNLTVEAVGADSASVRWAVREHRSPRPLGGARFRLLFDRFGQQPKFHRFVYLPESSDSATLRELRGDTPYLVCVEGVLGGRVCPVAPRDHCAGLVTLPEAGSRGGVDYQ

SEQ ID NO: 3110 - protein, 321 aa, synthetic construct
  REGION 1..321: note = TXNDC15 (Q96J42) SP+PP+ECD
MVPAAGRRPPRVMRLLGWWQVLLWVLGLPVRGVEVAEESGRLWSEEQPAHPLQVGAVYLGEEELLHDPMGQDRAAEEANAVLGLDTQGDHMVMLSVIPGEAEDKVSSEPSGVTCGAGGAEDSRCNVRESLFSLDGAGAHFPDREEEYYTEPEVAESDAAPTEDSNNTESLKSPKVNCEERNITGLENFTLKILNMSQDLMDFLNPNGSDCTLVLFYTPWCRFSASLAPHFNSLPRAFPALHFLALDASQHSSLSTRFGTVAVPNILLFQGAKPMARFNHTDRTLETLKIFIFNQTGIEAKKNVVVTQADQIGPLPSTLIKS

SEQ ID NO: 3111 - protein, 476 aa, synthetic construct
  REGION 1..476: note = TYR (P14679) SP+PP+ECD
MLLAVLYCLLWSFQTSAGHFPRACVSSKNLMEKECCPPWSGDRSPCGQLSGRGSCQNILLSNAPLGPQFPFTGVDDRESWPSVFYNRTCQCSGNFMGFNCGNCKFGFWGPNCTERRLLVRRNIFDLSAPEKDKFFAYLTLAKHTISSDYVIPIGTYGQMKNGSTPMFNDINIYDLFVWMHYYVSMDALLGGSEIWRDIDFAHEAPAFLPWHRLFLLRWEQEIQKLTGDENFTIPYWDWRDAEKCDICTDEYMGGQHPTNPNLLSPASFFSSWQIVCSRLEEYNSHQSLCNGTPEGPLRRNPGNHDKSRTPRLPSSADVEFCLSLTQYESGSMDKAANFSFRNTLEGFASPLTGIADASQSSMHNALHIYMNGTMSQVQGSANDPIFLLHHAFVDSIFEQWLRRHRPLQEVYPEANAPIGHNRESYMVPFIPLYRNGDFFISSKDLGYDYSYLQDSDPDSFQDYIKSYLEQASRIWS

SEQ ID NO: 3112 - protein, 429 aa, synthetic construct
  REGION 1..429: note = TYRO3 (Q06418) SP+PP+ECD
MALRRSMGRPGLPPLPLPPPPRLGLLLAALASLLLPESAAAGLKLMGAPVKLTVSQGQPVKLNCSVEGMEEPDIQWVKDGAVVQNLDQLYIPVSEQHWIGFLSLKSVERSDAGRYWCQVEDGGETEISQPVWLTVEGVPFFTVEPKDLAVPPNAPFQLSCEAVGPPEPVTIVWWRGTTKIGGPAPSPSVLNVTGVTQSTMFSCEAHNLKGLASSRTATVHLQALPAAPFNITVTKLSSSNASVAWMPGADGRALLQSCTVQVTQAPGGWEVLAVVVPVPPFTCLLRDLVPATNYSLRVRCANALGPSPYADWVPFQTKGLAPASAPQNLHAIRTDSGLILEWEEVIPEAPLEGPLGPYKLSWVQDNGTQDELTVEGTRANLTGWDPQKDLIVRVCVSNAVGCGPWSQPLVVSSHDRAGQQGPPHSRTSW

SEQ ID NO: 3113 - protein, 477 aa, synthetic construct
  REGION 1..477: note = TYRP1 (P17643) SP+PP+ECD
MSAPKLLSLGCIFFPLLLFQQARAQFPRQCATVEALRSGMCCPDLSPVSGPGTDRCGSSSGRGRCEAVTADSRPHSPQYPHDGRDDREVWPLRFFNRTCHCNGNFSGHNCGTCRPGWRGAACDQRVLIVRRNLLDLSKEEKNHFVRALDMAKRTTHPLFVIATRRSEEILGPDGNTPQFENISIYNYFVWTHYYSVKKTFLGVGQESFGEVDFSHEGPAFLTWHRYHLLRLEKDMQEMLQEPSFSLPYWNFATGKNVCDICTDDLMGSRSNFDSTLISPNSVFSQWRVVCDSLEDYDTLGTLCNSTEDGPIRRNPAGNVARPMVQRLPEPQDVAQCLEVGLFDTPPFYSNSTNSFRNTVEGYSDPTGKYDPAVRSLHNLAHLFLNGTGGQTHLSPNDPIFVLLHTFTDAVFDEWLRRYNADISTFPLENAPIGHNRQYNMVPFWPPVTNTEMFVTAPDNLGYTYEIQWPSREFSVPE

SEQ ID NO: 3114 - protein, 471 aa, synthetic construct
  REGION 1..471: note = UGT8 (Q16880) SP+PP+ECD
MKSYTPYFILLWSAVGIAKAAKIIIVPPIMFESHMYIFKTLASALHERGHHTVFLLSEGRDIAPSNHYSLQRYPGIFNSTTSDAFLQSKMRNIFSGRLTAIELFDILDHYTKNCDLMVGNHALIQGLKKEKFDLLLVDPNDMCGFVIAHLLGVKYAVFSTGLWYPAEVGAPAPLAYVPEFNSLLTDRMNLLQRMKNTGVYLISRLGVSFLVLPKYERIMQKYNLLPEKSMYDLVHGSSLWMLCTDVALEFPRPTLPNVVYVGGILTKPASPLPEDLQRWVNGANEHGFVLVSFGAGVKYLSEDIANKLAGALGRLPQKVIWRFSGPKPKNLGNNTKLIEWLPQNDLLGHSKIKAFLSHGGLNSIFETIYHGVPVVGIPLFGDHYDTMTRVQAKGMGILLEWKTVTEKELYEALVKVINNPSYRQRAQKLSEIHKDQPGHPVNRTIYWIDYIIRHNGAHHLRAAVHQISFCQ

SEQ ID NO: 3115 - protein, 1272 aa, synthetic construct
  REGION 1..1272: note = UMODL1 (Q5DID0) SP+PP+ECD
MLRTSGLALLALVSAVGPSQASGFTEKGLSLLGYQLCSHRVTHTVQKVEAVQTSYTSYVSCGGWIPWRRCPKMVYRTQYLVVEVPESRNVTDCCEGYEQLGLYCVLPLNQSGQFTSRPGACPAEGPEPSTSPCSLDIDCPGLEKCCPWSGGRYCMAPAPQAPERDPVGSWYNVTILVKMDFKELQQVDPRLLNHMRLLHSLVTSALQPMASTVHHLHSAPGNASTTVSRLLLGLPRPLPVADVSTLLGDIAKRVYEVISVQVQDVNECFYEELNACSGRELCANLEGSYWCVCHQEAPATSPRKLNLEWEDCPPVSDYVVLNVTSDSFQVSWRLNSTQNHTFHVRVYRGMELLRSARTQSQALAVAGLEAGVLYRVKTSYQGCGADVSTTLTIKTNAQVFEVTIKIVNHNLTEKLLNRSSVEYQDFSRQLLHEVESSFPPVVSDLYRSGKLRMQIVSLQAGSVVVRLKLTVQDPGFPMGISTLAPILQPLLASTVFQIDRQGTRVQDWDECVDSAEHDCSPAAWCINLEGSYTCQCRTTRDATPSRAGRACEGDLVSPMGGGLSAATGVTVPGLGTGTAALGLENFTLSPSPGYPQGTPAAGQAWTPEPSPRRGGSNVVGYDRNNTGKGVEQELQGNSIMEPPSWPSPTEDPTGHFLWHATRSTRETLLNPTWLRNEDSGPSGSVDLPLTSTLTALKTPACVPVSIGRIMVSNVTSTGFHLAWEADLAMDSTFQLTLTSMWSPAVVLETWNTSVTLSGLEPGVLHLVEIMAKACGKEGARAHLKVRTAARKLIGKVRIKNVRYSESFRNASSQEYRDFLELFFRMVRGSLPATMCQHMDAGGVRMEVVSVTNGSIVVEFHLLIIADVDVQEVSAAFLTAFQTVPLLEVIRGDTFIQDYDECERKEDDCVPGTSCRNTLGSFTCSCEGGAPDFPVEYSERPCEGDSPGNETWATSPERPLTTAGTKAAFVQGTSPTPQGLPQRLNLTGAVRVLCEIEKVVVAIQKRFLQQESIPESSLYLSHPSCNVSHSNGTHVLLEAGWSECGTLMQSNMTNTVVRTTLRNDLSQEGIIHHLKILSPIYCAFQNDLLTSSGFTLEWGVYTIIEDLHGAGNFVTEMQLFIGDSPIPQNYSVSASDDVRIEVGLYRQKSNLKVVLTECWATPSSNARDPITFSFINNSCPVPNTYTNVIENGNSNKAQFKLRIFSFINDSIVYLHCKLRVCMESPGATCKINCNNFRLLQNSETSATHQMSWGPLIRSEGEPPHAEAGLGAGY

SEQ ID NO: 3116 - protein, 306 aa, synthetic construct
  REGION 1..306: note = UNC5A (Q6ZN44) SP+PP+ECD
MAVRPGLWPALLGIVLAAWLRGSGAQQSATVANPVPGANPDLLPHFLVEPEDVYIVKNKPVLLVCKAVPATQIFFKCNGEWVRQVDHVIERSTDGSSGLPTMEVRINVSRQQVEKVFGLEEYWCQCVAWSSSGTTKSQKAYIRIAYLRKNFEQEPLAKEVSLEQGIVLPCRPPEGIPPAEVEWLRNEDLVDPSLDPNVYITREHSLVVRQARLADTANYTCVAKNIVARRRSASAAVIVYVDGSWSPWSKWSACGLDCTHWRSRECSDPAPRNGGEECQGTDLDTRNCTSDLCVHTASGPEDVALY

SEQ ID NO: 3117 - protein, 377 aa, synthetic construct
  REGION 1..377: note = UNC5B (Q8IZJ1) SP+PP+ECD
MGARSGARGALLLALLLCWDPRLSQAGTDSGSEVLPDSFPSAPAEPLPYFLQEPQDAYIVKNKPVELRCRAFPATQIYFKCNGEWVSQNDHVTQEGLDEATGLRVREVQIEVSRQQVEELFGLEDYWCQCVAWSSAGTTKSRRAYVRIAYLRKNFDQEPLGKEVPLDHEVLLQCRPPEGVPVAEVEWLKNEDVIDPTQDTNFLLTIDHNLIIRQARLSDTANYTCVAKNIVAKRRSTTATVIVYVNGGWSSWAEWSPCSNRCGRGWQKRTRTCTNPAPLNGGAFCEGQAFQKTACTTICPVDGAWTEWSKWSACSTECAHWRSRECMAPPPQNGGRDCSGTLLDSKNCTDGLCMQNKKTLSDPNSHLLEASGDAALY

SEQ ID NO: 3118 - protein, 380 aa, synthetic construct
  REGION 1..380: note = UNC5C (O95185) SP+PP+ECD
MRKGLRATAARCGLGLGYLLQMLVLPALALLSASGTGSAAQDDDFFHELPETFPSDPPEPLPHFLIEPEEAYIVKNKPVNLYCKASPATQIYFKCNSEWVHQKDHIVDERVDETSGLIVREVSIEISRQQVEELFGPEDYWCQCVAWSSAGTTKSRKAYVRIAYLRKTFEQEPLGKEVSLEQEVLLQCRPPEGIPVAEVEWLKNEDIIDPVEDRNFYITIDHNLIIKQARLSDTANYTCVAKNIVAKRKSTTATVIVYVNGGWSTWTEWSVCNSRCGRGYQKRTRTCTNPAPLNGGAFCEGQSVQKIACTTLCPVDGRWTPWSKWSTCGTECTHWRRRECTAPAPKNGGKDCDGLVLQSKNCTDGLCMQTAPDSDDVALY

SEQ ID NO: 3119 - protein, 379 aa, synthetic construct
  REGION 1..379: note = UNC5D (Q6UXZ4) SP+PP+ECD
MGRAAATAGGGGGARRWLPWLGLCFWAAGTAAARGTDNGEALPESIPSAPGTLPHFIEEPDDAYIIKSNPIALRCKARPAMQIFFKCNGEWVHQNEHVSEETLDESSGLKVREVFINVTRQQVEDFHGPEDYWCQCVAWSHLGTSKSRKASVRIAYLRKNFEQDPQGREVPIEGMIVLHCRPPEGVPAAEVEWLKNEEPIDSEQDENIDTRADHNLIIRQARLSDSGNYTCMAANIVAKRRSLSATVVVYVNGGWSSWTEWSACNVRCGRGWQKRSRTCTNPAPLNGGAFCEGMSVQKITCTSLCPVDGSWEVWSEWSVCSPECEHLRIRECTAPPPRNGGKFCEGLSQESENCTDGLCILDKKPLHEIKPQSIENASD

SEQ ID NO: 3120 - protein, 155 aa, synthetic construct
  REGION 1..155: note = UPK2 (O00526) SP+PP+ECD
MAPLLPIRTLPLILILLALLSPGAADFNISSLSGLLSPALTESLLVALPPCHLTGGNATLMVRRANDSKVVTSSFVVPPCRGRRELVSVVDSGAGFTVTRLSAYQVTNLVPGTKFYISYLVKKGTATESSREIPMSTLPRRNMESIGLGMARTGG

SEQ ID NO: 3121 - protein, 207 aa, synthetic construct
  REGION 1..207: note = UPK3A (O75631) SP+PP+ECD
MPPLWALLALGCLRFGSAVNLQPQLASVTFATNNPTLTTVALEKPLCMFDSKEALTGTHEVYLYVLVDSAISRNASVQDSTNTPLGSTFLQTEGGRTGPYKAVAFDLIPCSDLPSLDAIGDVSKASQILNAYLVRVGANGTCLWDPNFQGLCNAPLSAATEYRFKYVLVNMSTGLVEDQTLWSDPIRTNQLTPYSTIDTWPGRRSGG

SEQ ID NO: 3122 - protein, 240 aa, synthetic construct
  REGION 1..240: note = UPK3B (Q9BT76) SP+PP+ECD
MGLPWGQPHLGLQMLLLALNCLRPSLSLGEWGSWMDASSQTQGAGGPAGVIGPWAPAPLRLGEAAPGTPTPVSVAHLLSPVATELVPYTPQITAWDLEGKVTATTFSLEQPRCVFDGLASASDTVWLVVAFSNASRGFQNPETLADIPASPQLLTDGHYMTLPLSPDQLPCGDPMAGSGGAPVLRVGHDHGCHQQPFCNAPLPGPGPYREDPRIHRHLARAAKWQHDRHYLHPLFSGRPP

SEQ ID NO: 3123 - protein, 204 aa, synthetic construct
  REGION 1..204: note = UPK3BL (B0FP48) SP+PP+ECD
MDNSWRLGPAIGLSAGQSQLLVSLLLLLTRVQPGTDVAAPEHISYVPQLSNDTLAGRLTLSTFTLEQPLGQFSSHNISDLDTIWLVVALSNATQSFTAPRTNQDIPAPANFSQRGYYLTLRANRVLYQTRGQLHVLRVGNDTHCQPTKIGCNHPLPGPGPYRVKFLVMNDEGPVAETKWSSDTRLQQAQALRAVPGPQSPGTVV

SEQ ID NO: 3124 - protein, 5042 aa, synthetic construct
  REGION 1..5042: note = USH2A (O75445) SP+PP+ECD
MNCPVLSLGSGFLFQVIEMLIFAYFASISLTESRGLFPRLENVGAFKKVSIVPTQAVCGLPDRSTFCHSSAAAESIQFCTQRFCIQDCPYRSSHPTYTALFSAGLSSCITPDKNDLHPNAHSNSASFIFGNHKSCFSSPPSPKLMASFTLAVWLKPEQQGVMCVIEKTVDGQIVFKLTISEKETMFYYRTVNGLQPPIKVMTLGRILVKKWIHLSVQVHQTKISFFINGVEKDHTPFNARTLSGSITDFASGTVQIGQSLNGLEQFVGRMQDFRLYQVALTNREILEVFSGDLLRLHAQSHCRCPGSHPRVHPLAQRYCIPNDAGDTADNRVSRLNPEAHPLSFVNDNDVGTSWVSNVFTNITQLNQGVTISVDLENGQYQVFYIIIQFFSPQPTEIRIQRKKENSLDWEDWQYFARNCGAFGMKNNGDLEKPDSVNCLQLSNFTPYSRGNVTFSILTPGPNYRPGYNNFYNTPSLQEFVKATQIRFHFHGQYYTTETAVNLRHRYYAVDEITISGRCQCHGHADNCDTTSQPYRCLCSQESFTEGLHCDRCLPLYNDKPFRQGDQVYAFNCKPCQCNSHSKSCHYNISVDPFPFEHFRGGGGVCDDCEHNTTGRNCELCKDYFFRQVGADPSAIDVCKPCDCDTVGTRNGSILCDQIGGQCNCKRHVSGRQCNQCQNGFYNLQELDPDGCSPCNCNTSGTVDGDITCHQNSGQCKCKANVIGLRCDHCNFGFKFLRSFNDVGCEPCQCNLHGSVNKFCNPHSGQCECKKEAKGLQCDTCRENFYGLDVTNCKACDCDTAGSLPGTVCNAKTGQCICKPNVEGRQCNKCLEGNFYLRQNNSFLCLPCNCDKTGTINGSLLCNKSTGQCPCKLGVTGLRCNQCEPHRYNLTIDNFQHCQMCECDSLGTLPGTICDPISGQCLCVPNRQGRRCNQCQPGFYISPGNATGCLPCSCHTTGAVNHICNSLTGQCVCQDASIAGQRCDQCKDHYFGFDPQTGRCQPCNCHLSGALNETCHLVTGQCFCKQFVTGSKCDACVPSASHLDVNNLLGCSKTPFQQPPPRGQVQSSSAINLSWSPPDSPNAHWLTYSLLRDGFEIYTTEDQYPYSIQYFLDTDLLPYTKYSYYIETTNVHGSTRSVAVTYKTKPGVPEGNLTLSYIIPIGSDSVTLTWTTLSNQSGPIEKYILSCAPLAGGQPCVSYEGHETSATIWNLVPFAKYDFSVQACTSGGCLHSLPITVTTAQAPPQRLSPPKMQKISSTELHVEWSPPAELNGIIIRYELYMRRLRSTKETTSEESRVFQSSGWLSPHSFVESANENALKPPQTMTTITGLEPYTKYEFRVLAVNMAGSVSSAWVSERTGESAPVFMIPPSVFPLSSYSLNISWEKPADNVTRGKVVGYDINMLSEQSPQQSIPMAFSQLLHTAKSQELSYTVEGLKPYRIYEFTITLCNSVGCVTSASGAGQTLAAAPAQLRPPLVKGINSTTIHLRWFPPEELNGPSPIYQLERRESSLPALMTTMMKGIRFIGNGYCKFPSSTHPVNTDFTGIKASFRTKVPEGLIVFAASPGNQEEYFALQLKKGRLYFLFDPQGSPVEVTTTNDHGKQYSDGKWHEIIAIRHQAFGQITLDGIYTGSSAILNGSTVIGDNTGVFLGGLPRSYTILRKDPEIIQKGFVGCLKDVHFMKNYNPSAIWEPLDWQSSEEQINVYNSWEGCPASLNEGAQFLGAGFLELHPYMFHGGMNFEISFKFRTDQLNGLLLFVYNKDGPDFLAMELKSGILTFRLNTSLAFTQVDLLLGLSYCNGKWNKVIIKKEGSFISASVNGLMKHASESGDQPLVVNSPVYVGGIPQELLNSYQHLCLEQGFGGCMKDVKFTRGAVVNLASVSSGAVRVNLDGCLSTDSAVNCRGNDSILVYQGKEQSVYEGGLQPFTEYLYRVIASHEGGSVYSDWSRGRTTGAAPQSVPTPSRVRSLNGYSIEVTWDEPVVRGVIEKYILKAYSEDSTRPPRMPSASAEFVNTSNLTGILTGLLPFKNYAVTLTACTLAGCTESSHALNISTPQEAPQEVQPPVAKSLPSSLLLSWNPPKKANGIITQYCLYMDGRLIYSGSEENYIVTDLAVFTPHQFLLSACTHVGCTNSSWVLLYTAQLPPEHVDSPVLTVLDSRTIHIQWKQPRKISGILERYVLYMSNHTHDFTIWSVIYNSTELFQDHMLQYVLPGNKYLIKLGACTGGGCTVSEASEALTDEDIPEGVPAPKAHSYSPDSFNVSWTEPEYPNGVITSYGLYLDGILIHNSSELSYRAYGFAPWSLHSFRVQACTAKGCALGPLVENRTLEAPPEGTVNVFVKTQGSRKAHVRWEAPFRPNGLLTHSVLFTGIFYVDPVGNNYTLLNVTKVMYSGEETNLWVLIDGLVPFTNYTVQVNISNSQGSLITDPITIAMPPGAPDGVLPPRLSSATPTSLQVVWSTPARNNAPGSPRYQLQMRSGDSTHGFLELFSNPSASLSYEVSDLQPYTEYMFRLVASNGFGSAHSSWIPFMTAEDKPGPVVPPILLDVKSRMMLVTWQHPRKSNGVITHYNIYLHGRLYLRTPGNVTNCTVMHLHPYTAYKFQVEACTSKGCSLSPESQTVWTLPGAPEGIPSPELFSDTPTSVIISWQPPTHPNGLVENFTIERRVKGKEEVTTLVTLPRSHSMRFIDKTSALSPWTKYEYRVLMSTLHGGTNSSAWVEVTTRPSRPAGVQPPVVTVLEPDAVQVTWKPPLIQNGDILSYEIHMPDPHITLTNVTSAVLSQKVTHLIPFTNYSVTIVACSGGNGYLGGCTESLPTYVTTHPTVPQNVGPLSVIPLSESYVVISWQPPSKPNGPNLRYELLRRKIQQPLASNPPEDLNRWHNIYSGTQWLYEDKGLSRFTTYEYMLFVHNSVGFTPSREVTVTTLAGLPERGANLTASVLNHTAIDVRWAKPTVQDLQGEVEYYTLFWSSATSNDSLKILPDVNSHVIGHLKPNTEYWIFISVFNGVHSINSAGLHATTCDGEPQGMLPPEVVIINSTAVRVIWTSPSNPNGVVTEYSIYVNNKLYKTGMNVPGSFILRDLSPFTIYDIQVEVCTIYACVKSNGTQITTVEDTPSDIPTPTIRGITSRSLQIDWVSPRKPNGIILGYDLLWKTWYPCAKTQKLVQDQSDELCKAVRCQKPESICGHICYSSEAKVCCNGVLYNPKPGHRCCEEKYIPFVLNSTGVCCGGRIQEAQPNHQCCSGYYARILPGEVCCPDEQHNRVSVGIGDSCCGRMPYSTSGNQICCAGRLHDGHGQKCCGRQIVSNDLECCGGEEGVVYNRLPGMFCCGQDYVNMSDTICCSASSGESKAHIKKNDPVPVKCCETELIPKSQKCCNGVGYNPLKYVCSDKISTGMMMKETKECRILCPASMEATEHCGRCDFNFTSHICTVIRGSHNSTGKASIEEMCSSAEETIHTGSVNTYSYTDVNLKPYMTYEYRISAWNSYGRGLSKAVRARTKEDVPQGVSPPTWTKIDNLEDTIVLNWRKPIQSNGPIIYYILLRNGIERFRGTSLSFSDKEGIQPFQEYSYQLKACTVAGCATSSKVVAATTQGVPESILPPSITALSAVALHLSWSVPEKSNGVIKEYQIRQVGKGLIHTDTTDRRQHTVTGLQPYTNYSFTLTACTSAGCTSSEPFLGQTLQAAPEGVWVTPRHIIINSTTVELYWSLPEKPNGLVSQYQLSRNGNLLFLGGSEEQNFTDKNLEPNSRYTYKLEVKTGGGSSASDDYIVQTPMSTPEEIYPPYNITVIGPYSIFVAWIPPGILIPEIPVEYNVLLNDGSVTPLAFSVGHHQSTLLENLTPFTQYEIRIQACQNGSCGVSSRMFVKTPEAAPMDLNSPVLKALGSACIEIKWMPPEKPNGIIINYFIYRRPAGIEEESVLFVWSEGALEFMDEGDTLRPFTLYEYRVRACNSKGSVESLWSLTQTLEAPPQDFPAPWAQATSAHSVLLNWTKPESPNGIISHYRVVYQERPDDPTFNSPTVHAFTVKGTSHQAHLYGLEPFTTYRIGVVAANHAGEILSPWTLIQTLESSPSGLRNFIVEQKENGRALLLQWSEPMRTNGVIKTYNIFSDGFLEYSGLNRQFLFRRLDPFTLYTLTLEACTRAGCAHSAPQPLWTDEAPPDSQLAPTVHSVKSTSVELSWSEPVNPNGKIIRYEVIRRCFEGKAWGNQTIQADEKIVFTEYNTERNTFMYNDTGLQPWTQCEYKIYTWNSAGHTCSSWNVVRTLQAPPEGLSPPVISYVSMNPQKLLISWIPPEQSNGIIQSYRLQRNEMLYPFSFDPVTFNYTDEELLPFSTYSYALQACTSGGCSTSKPTSITTLEAAPSEVSPPDLWAVSATQMNVCWSPPTVQNGKITKYLVRYDNKESLAGQGLCLLVSHLQPYSQYNFSLVACTNGGCTASVSKSAWTMEALPENMDSPTLQVTGSESIEITWKPPRNPNGQIRSYELRRDGTIVYTGLETRYRDFTLTPGVEYSYTVTASNSQGGILSPLVKDRTSPSAPSGMEPPKLQARGPQEILVNWDPPVRTNGDIINYTLFIRELFERETKIIHINTTHNSFGMQSYIVNQLKPFHRYEIRIQACTTLGCASSDWTFIQTPEIAPLMQPPPHLEVQMAPGGFQPTVSLLWTGPLQPNGKVLYYELYRRQIATQPRKSNPVLIYNGSSTSFIDSELLPFTEYEYQVWAVNSAGKAPSSWTWCRTGPAPPEGLRAPTFHVISSTQAVVNISAPGKPNGIVSLYRLFSSSAHGAETVLSEGMATQQTLHGLQAFTNYSIGVEACTCFNCCSKGPTAELRTHPAPPSGLSSPQIGTLASRTASFRWSPPMFPNGVIHSYELQFHVACPPDSALPCTPSQIETKYTGLGQKASLGGLQPYTTYKLRVVAHNEVGSTASEWISFTTQKELPQYRAPFSVDSNLSVVCVNWSDTFLLNGQLKEYVLTDGGRRVYSGLDTTLYIPRTADKTFFFQVICTTDEGSVKTPLIQYDTSTGLGLVLTTPGKKKGSRSKSTEFYSELW

SEQ ID NO: 3125 - protein, 575 aa, synthetic construct
  REGION 1..575: note = VASN (Q6EMK4) SP+PP+ECD
MCSRVPLLLPLLLLLALGPGVQGCPSGCQCSQPQTVFCTARQGTTVPRDVPPDTVGLYVFENGITMLDAGSFAGLPGLQLLDLSQNQIASLPSGVFQPLANLSNLDLTANRLHEITNETFRGLRRLERLYLGKNRIRHIQPGAFDTLDRLLELKLQDNELRALPPLRLPRLLLLDLSHNSLLALEPGILDTANVEALRLAGLGLQQLDEGLFSRLRNLHDLDVSDNQLERVPPVIRGLRGLTRLRLAGNTRIAQLRPEDLAGLAALQELDVSNLSLQALPGDLSGLFPRLRLLAAARNPFNCVCPLSWFGPWVRESHVTLASPEETRCHFPPKNAGRLLLELDYADFGCPATTTTATVPTTRPVVREPTALSSSLAPTWLSPTEPATEAPSPPSTAPPTVGPVPQPQDCPPSTCLNGGTCHLGTRHHLACLCPEGFTGLYCESQMGQGTRPSPTPVTPRPPRSLTLGIEPVSPTSLRVGLQRYLQGSSVQLRSLRLTYRNLSGPDKRLVTLRLPASLAEYTVTQLRPNATYSVCVMPLGPGRVPEGEEACGEAHTPPAVHSNHAPVTQAREGNLP

SEQ ID NO: 3126 - protein, 698 aa, synthetic construct
  REGION 1..698: note = VCAM1 (P19320) SP+PP+ECD
MPGKMVVILGASNILWIMFAASQAFKIETTPESRYLAQIGDSVSLTCSTTGCESPFFSWRTQIDSPLNGKVTNEGTTSTLTMNPVSFGNEHSYLCTATCESRKLEKGIQVEIYSFPKDPEIHLSGPLEAGKPITVKCSVADVYPFDRLEIDLLKGDHLMKSQEFLEDADRKSLETKSLEVTFTPVIEDIGKVLVCRAKLHIDEMDSVPTVRQAVKELQVYISPKNTVISVNPSTKLQEGGSVTMTCSSEGLPAPEIFWSKKLDNGNLQHLSGNATLTLIAMRMEDSGIYVCEGVNLIGKNRKEVELIVQEKPFTVEISPGPRIAAQIGDSVMLTCSVMGCESPSFSWRTQIDSPLSGKVRSEGTNSTLTLSPVSFENEHSYLCTVTCGHKKLEKGIQVELYSFPRDPEIEMSGGLVNGSSVTVSCKVPSVYPLDRLEIELLKGETILENIEFLEDTDMKSLENKSLEMTFIPTIEDTGKALVCQAKLHIDDMEFEPKQRQSTQTLYVNVAPRDTTVLVSPSSILEEGSSVNMTCLSQGFPAPKILWSRQLPNGELQPLSENATLTLISTKMEDSGVYLCEGINQAGRSRKEVELIIQVTPKDIKLTAFPSESVKEGDTVIISCTCGNVPETWIILKKKAETGDTVLKSIDGAYTIRKAQLKDAGVYECESKNKVGSQLRSLTLDVQGRENNKDYFSPE

SEQ ID NO: 3127 - protein, 797 aa, synthetic construct
  REGION 1..797: note = VLDLR (P98155) SP+PP+ECD
MGTSALWALWLLLALCWAPRESGATGTGRKAKCEPSQFQCTNGRCITLLWKCDGDEDCVDGSDEKNCVKKTCAESDFVCNNGQCVPSRWKCDGDPDCEDGSDESPEQCHMRTCRIHEISCGAHSTQCIPVSWRCDGENDCDSGEDEENCGNITCSPDEFTCSSGRCISRNFVCNGQDDCSDGSDELDCAPPTCGAHEFQCSTSSCIPISWVCDDDADCSDQSDESLEQCGRQPVIHTKCPASEIQCGSGECIHKKWRCDGDPDCKDGSDEVNCPSRTCRPDQFECEDGSCIHGSRQCNGIRDCVDGSDEVNCKNVNQCLGPGKFKCRSGECIDISKVCNQEQDCRDWSDEPLKECHINECLVNNGGCSHICKDLVIGYECDCAAGFELIDRKTCGDIDECQNPGICSQICINLKGGYKCECSRGYQMDLATGVCKAVGKEPSLIFTNRRDIRKIGLERKEYIQLVEQLRNTVALDADIAAQKLFWADLSQKAIFSASIDDKVGRHVKMIDNVYNPAAIAVDWVYKTIYWTDAASKTISVATLDGTKRKFLFNSDLREPASIAVDPLSGFVYWSDWGEPAKIEKAGMNGFDRRPLVTADIQWPNGITLDLIKSRLYWLDSKLHMLSSVDLNGQDRRIVLKSLEFLAHPLALTIFEDRVYWIDGENEAVYGANKFTGSELATLVNNLNDAQDIIVYHELVQPSGKNWCEEDMENGGCEYLCLPAPQINDHSPKYTCSCPSGYNVEENGRDCQSTATTVTYSETKDTNTTEISATSGLVPGGINVTTAVSEVSVPPKGTS

SEQ ID NO: 3128 - protein, 232 aa, synthetic construct
  REGION 1..232: note = VSIG1 (Q86XK7) SP+PP+ECD
MVFAFWKVFLILSCLAGQVSVVQVTIPDGFVNVTVGSNVTLICIYTTTVASREQLSIQWSFFHKKEMEPISIYFSQGGQAVAIGQFKDRITGSNDPGNASITISHMQPADSGIYICDVNNPPDFLGQNQGILNVSVLVKPSKPLCSVQGRPETGHTISLSCLSALGTPSPVYYWHKLEGRDIVPVKENFNPTTGILVIGNLTNFEQGYYQCTAINRLGNSSCEIDLTSSHPE

SEQ ID NO: 3129 - protein, 413 aa, synthetic construct
  REGION 1..413: note = VSIG10 (Q8N0Z9) SP+PP+ECD
MAAGGSAPEPRVLVCLGALLAGWVAVGLEAVVIGEVHENVTLHCGNISGLRGQVTWYRNNSEPVFLLSSNSSLRPAEPRFSLVDATSLHIESLSLGDEGIYTCQEILNVTQWFQVWLQVASGPYQIEVHIVATGTLPNGTLYAARGSQVDFSCNSSSRPPPVVEWWFQALNSSSESFGHNLTVNFFSLLLISPNLQGNYTCLALNQLSKRHRKVTTELLVYYPPPSAPQCWAQMASGSFMLQLTCRWDGGYPDPDFLWIEEPGGVIVGKSKLGVEMLSESQLSDGKKFKCVTSHIVGPESGASCMVQIRGPSLLSEPMKTCFTGGNVTLTCQVSGAYPPAKILWLRNLTQPEVIIQPSSRHLITQDGQNSTLTIHNCSQDLDEGYYICRADSPVGVREMEIWLSVKEPLNIGG

SEQ ID NO: 3130 - protein, 776 aa, synthetic construct
  REGION 1..776: note = VSIG10L (Q86VR7) SP+PP+ECD
MDNPQALPLFLLLASLVGILTLRASSGLQQTNFSSAFSSDSKSSSQGLGVEVPSIKPPSWKVPDQFLDSKASAGISDSSWFPEALSSNMSGSFWSNVSAEGQDLSPVSPFSETPGSEVFPDISDPQVPAKDPKPSFTVKTPASNISTQVSHTKLSVEAPDSKFSPDDMDLKLSAQSPESKFSAETHSAASFPQQVGGPLAVLVGTTIRLPLVPIPNPGPPTSLVVWRRGSKVLAAGGLGPGAPLISLDPAHRDHLRFDQARGVLELASAQLDDAGVYTAEVIRAGVSQQTHEFTVGVYEPLPQLSVQPKAPETEEGAAELRLRCLGWGPGRGELSWSRDGRALEAAESEGAETPRMRSEGDQLLIVRPVRSDHARYTCRVRSPFGHREAAADVSVFYGPDPPTITVSSDRDAAPARFVTAGSNVTLRCAAASRPPADITWSLADPAEAAVPAGSRLLLPAVGPGHAGTYACLAANPRTGRRRRSLLNLTVADLPPGAPQCSVEGGPGDRSLRFRCSWPGGAPAASLQFQGLPEGIRAGPVSSVLLAAVPAHPRLSGVPITCLARHLVATRTCTVTPEAPREVLLHPLVAETRLGEAEVALEASGCPPPSRASWAREGRPLAPGGGSRLRLSQDGRKLHIGNFSLDWDLGNYSVLCSGALGAGGDQITLIGPSISSWRLQRARDAAVLTWDVERGALISSFEIQAWPDGPALGRTSTYRDWVSLLILGPQERSAVVPLPPRNPGTWTFRILPILGGQPGTPSQSRVYRAGPTLSHGA

SEQ ID NO: 3131 - protein, 243 aa, synthetic construct
  REGION 1..243: note = VSIG2 (Q96IQ7) SP+PP+ECD
MAELPGPFLCGALLGFLCLSGLAVEVKVPTEPLSTPLGKTAELTCTYSTSVGDSFALEWSFVQPGKPISESHPILYFTNGHLYPTGSKSKRVSLLQNPPTVGVATLKLTDVHPSDTGTYLCQVNNPPDFYTNGLGLINLTVLVPPSNPLCSQSGQTSVGGSTALRCSSSEGAPKPVYNWVRLGTFPTPSPGSMVQDEVSGQLILTNLSLTSSGTYRCVATNQMGSASCELTLSVTEPSQGRVA

SEQ ID NO: 3132 - protein, 135 aa, synthetic construct
  REGION 1..135: note = VSTM1 (Q6UX27) SP+PP+ECD
MTAEFLSLLCLGLCLGYEDEKKNEKPPKPSLHAWPSSVVEAESNVTLKCQAHSQNVTFVLRKVNDSGYKQEQSSAENEAEFPFTDLKPKDAGRYFCAYKTTASHEWSESSEHLQLVVTDKHDELEAPSMKTDTRT

SEQ ID NO: 3133 - protein, 180 aa, synthetic construct
  REGION 1..180: note = VSTM4 (Q8IW00) SP+PP+ECD
MRLLALAAAALLARAPAPEVCAALNVTVSPGPVVDYLEGENATLLCHVSQKRRKDSLLAVRWFFAHSFDSQEALMVKMTKLRVVQYYGNFSRSAKRRRLRLLEEQRGALYRLSVLTLQPSDQGHYVCRVQEISRHRNKWTAWSNGSSATEMRVISLKASEESSFEKTKETWAFFEDLYVY

SEQ ID NO: 3134 - protein, 147 aa, synthetic construct
  REGION 1..147: note = VSTM5 (A8MXK1) SP+PP+ECD
MRPLPSGRRKTRGISLGLFALCLAAARCLQSQGVSLYIPQATINATVKEDILLSVEYSCHGVPTIEWTYSSNWGTQKIVEWKPGTQANISQSHKDRVCTFDNGSIQLFSVGVRDSGYYVITVTERLGSSQFGTIVLHVSEILYEDLH

SEQ ID NO: 3135 - protein, 259 aa, synthetic construct
  REGION 1..259: note = VTCN1 (Q7Z7D3) SP+PP+ECD
MASLGQILFWSIISIIIILAGAIALIIGFGISGRHSITVTTVASAGNIGEDGILSCTFEPDIKLSDIVIQWLKEGVLGLVHEFKEGKDELSEQDEMFRGRTAVFADQVIVGNASLRLKNVQLTDAGTYKCYIITSKGKGNANLEYKTGAFSMPEVNVDYNASSETLRCEAPRWFPQPTVVWASQVDQGANFSEVSNTSFELNSENVTMKVVSVLYNVTINNTYSCMIENDIAKATGDIKVTESEIKRRSHLQLLNSKAS

SEQ ID NO: 3136 - protein, 2757 aa, synthetic construct
  REGION 1..2757: note = ZAN (Q9Y493) SP+PP+ECD
MVPPVWTLLLLVGAALFRKEKPPDQKLVVRSSRDNYVLTQCDFEDDAKPLCDWSQVSADDEDWVRASGPSPTGSTGAPGGYPNGEGSYLHMESNSFHRGGVARLLSPDLWEQGPLCVHFAHHMFGLSWGAQLRLLLLSGEEGRRPDVLWKHWNTQRPSWMLTTVTVPAGFTLPTRLMFEGTRGSTAYLDIALDALSIRRGSCNRVCMMQTCSFDIPNDLCDWTWIPTASGAKWTQKKGSSGKPGVGPDGDFSSPGSGCYMLLDPKNARPGQKAVLLSPVSLSSGCLSFSFHYILRGQSPGAALHIYASVLGSIRKHTLFSGQPGPNWQAVSVNYTAVGRIQFAVVGVFGKTPEPAVAVDATSIAPCGEGFPQCDFEDNAHPFCDWVQTSGDGGHWALGHKNGPVHGMGPAGGFPNAGGHYIYLEADEFSQAGQSVRLVSRPFCAPGDICVEFAYHMYGLGEGTMLELLLGSPAGSPPIPLWKRVGSQRPYWQNTSVTVPSGHQQPMQLIFKGIQGSNTASVVAMGFILINPGTCPVKVLPELPPVSPVSSTGPSETTGLTENPTISTKKPTVSIEKPSVTTEKPTVPKEKPTIPTEKPTISTEKPTIPSEKPNMPSEKPTIPSEKPTILTEKPTIPSEKPTIPSEKPTISTEKPTVPTEEPTTPTEETTTSMEEPVIPTEKPSIPTEKPSIPTEKPTISMEETIISTEKPTISPEKPTIPTEKPTIPTEKSTISPEKPTTPTEKPTIPTEKPTISPEKPTTPTEKPTISPEKLTIPTEKPTIPTEKPTIPTEKPTISTEEPTTPTEETTISTEKPSIPMEKPTLPTEETTTSVEETTISTEKLTIPMEKPTISTEKPTIPTEKPTISPEKLTIPTEKLTIPTEKPTIPIEETTISTEKLTIPTEKPTISPEKPTISTEKPTIPTEKPTIPTEETTISTEKLTIPTEKPTISPEKLTIPTEKPTISTEKPTIPTEKLTIPTEKPTIPTEKPTIPTEKLTALRPPHPSPTATGLAALVMSPHAPSTPMTSVILGTTTTSRSSTERCPPNARYESCACPASCKSPRPSCGPLCREGCVCNPGFLFSDNHCIQASSCNCFYNNDYYEPGAEWFSPNCTEHCRCWPGSRVECQISQCGTHTVCQLKNGQYGCHPYAGTATCLVYGDPHYVTFDGRHFGFMGKCTYILAQPCGNSTDPFFRVTAKNEEQGQEGVSCLSKVYVTLPESTVTLLKGRRTLVGGQQVTLPAIPSKGVFLGASGRFVELQTEFGLRVRWDGDQQLYVTVSSTYSGKLCGLCGNYDGNSDNDHLKLDGSPAGDKEELGNSWQTDQDEDQECQKYQVVNSPSCDSSLQSSMSGPGFCGRLVDTHGPFETCLLHVKAASFFDSCMLDMCGFQGLQHLLCTHMSTMTTTCQDAGHAVKPWREPHFCPMACPPNSKYSLCAKPCPDTCHSGFSGMFCSDRCVEACECNPGFVLSGLECIPRSQCGCLHPAGSYFKVGERWYKPGCKELCVCESNNRIRCQPWRCRAQEFCGQQDGIYGCHAQGAATCTASGDPHYLTFDGALHHFMGTCTYVLTRPCWSRSQDSYFVVSATNENRGGILEVSYIKAVHVTVFDLSISLLRGCKVMLNGHRVALPVWLAQGRVTIRLSSNLVLLYTNFGLQVRYDGSHLVEVTVPSSYGGQLCGLCGNYNNNSLDDNLRPDRKLAGDSMQLGAAWKLPESSEPGCFLVGGKPSSCQENSMADAWNKNCAILINPQGPFSQCHQVVPPQSSFASCVHGQCGTKGDTTALCRSLQAYASLCAQAGQAPAWRNRTFCPMRCPPGSSYSPCSSPCPDTCSSINNPRDCPKALPCAESCECQKGHILSGTSCVPLGQCGCTDPAGSYHPVGERWYTENTCTRLCTCSVHNNITCFQSTCKPNQICWALDGLLHCRASGVGVCQLPGESHYVSFDGSNHSIPDACTLVLVKVCHPAMALPFFKISAKHEKEEGGTEAFRLHEVYIDIYDAQVTLQKGHRVLINSKQVTLPAISQIPGVSVKSSSIYSIVNIKIGVQVKFDGNHLLEIEIPTTYYGKVCGMCGNFNDEEEDELMMPSDEVANSDSEFVNSWKDKDIDPSCQSLLVDEQQIPAEQQENPSGNCRAADLRRAREKCEAALRAPVWAQCASRIDLTPFLVDCANTLCEFGGLYQALCQALQAFGATCQSQGLKPPLWRNSSFCPLECPAYSSYTNCLPSCSPSCWDLDGRCEGAKVPSACAEGCICQPGYVLSEDKCVPRSQCGCKDAHGGSIPLGKSWVSSGCTEKCVCTGGAIQCGDFRCPSGSHCQLTSDNSNSNCVSDKSEQCSVYGDPRYLTFDGFSYRLQGRMTYVLIKTVDVLPEGVEPLLVEGRNKMDPPRSSIFLQEVITTVYGYKVQLQAGLELVVNNQKMAVPYRPNEHLRVTLWGQRLYLVTDFELVVSFGGRKNAVISLPSMYEGLVSGLCGNYDKNRKNDMMLPSGALTQNLNTFGNSWEVKTEDALLRFPRAIPAEEEGQGAELGLRTGLQVSECSPEQLASNSTQACRVLADPQGPFAACHQTVAPEPFQEHCVLDLCSAQDPREQEELRCQVLSGHGVSSRYHISELYDTLPSILCQPGRPRGLRGPLRGRLRQHPRLCLQWHPEPPLADCGCTSNGIYYQLGSSFLTEDCSQRCTCASSRILLCEPFSCRAGEVCTLGNHTQGCFPESPCLQNPCQNDGQCREQGATFTCECEVGYGGGLCMEPRDAPPPRKPAS

SEQ ID NO: 3137 - protein, 250 aa, synthetic construct
  REGION 1..250: note = ZNRF4 (Q8WWF5) SP+PP+ECD
MPLCRPEHLMPRASRVPVAASLPLSHAVIPTQLPSRPGHRPPGRPRRCPKASCLPPPVGPSSTQTAKRVTMGWPRPGRALVAVKALLVLSLLQVPAQAVVRAVLEDNSSSVDFADLPALFGVPLAPEGIRGYLMEVKPANACHPIEAPRLGNRSLGAIVLIRRYDCTFDLKVLNAQRAGFEAAIVHNVHSDDLVSMTHVYEDLRGQIAIPSVFVSEAASQDLRVILGCNKSAHALLLPDDPPCHDLGCHP

SEQ ID NO: 3138 - protein, 601 aa, synthetic construct
  REGION 1..601: note = ZP1 (P60852) SP+PP+ECD
MAGGSATTWGYPVALLLLVATLGLGRWLQPDPGLPGLRHSYDCGIKGMQLLVFPRPGQTLRFKVVDEFGNRFDVNNCSICYHWVTSRPQEPAVFSADYRGCHVLEKDGRFHLRVFMEAVLPNGRVDVAQDATLICPKPDPSRTLDSQLAPPAMFSVSTPQTLSFLPTSGHTSQGSGHAFPSPLDPGHSSVHPTPALPSPGPGPTLATLAQPHWGTLEHWDVNKRDYIGTHLSQEQCQVASGHLPCIVRRTSKEACQQAGCCYDNTREVPCYYGNTATVQCFRDGYFVLVVSQEMALTHRITLANIHLAYAPTSCSPTQHTEAFVVFYFPLTHCGTTMQVAGDQLIYENWLVSGIHIQKGPQGSITRDSTFQLHVRCVFNASDFLPIQASIFPPPSPAPMTQPGPLRLELRIAKDETFSSYYGEDDYPIVRLLREPVHVEVRLLQRTDPNLVLLLHQCWGAPSANPFQQPQWPILSDGCPFKGDSYRTQMVALDGATPFQSHYQRFTVATFALLDSGSQRALRGLVYLFCSTSACHTSGLETCSTACSTGTTRQRRSSGHRNDTARPQDIVSSPGPVGFEDSYGQEPTLGPTDSNGNSSLRP

SEQ ID NO: 3139 - protein, 716 aa, synthetic construct
  REGION 1..716: note = ZP2 (Q05996) SP+PP+ECD
MACRQRGGSWSPSGWFNAGWSTYRSISLFFALVTSGNSIDVSQLVNPAFPGTVTCDEREITVEFPSSPGTKKWHASVVDPLGLDMPNCTYILDPEKLTLRATYDNCTRRVHGGHQMTIRVMNNSAALRHGAVMYQFFCPAMQVEETQGLSASTICQKDFMSFSLPRVFSGLADDSKGTKVQMGWSIEVGDGARAKTLTLPEAMKEGFSLLIDNHRMTFHVPFNATGVTHYVQGNSHLYMVSLKLTFISPGQKVIFSSQAICAPDPVTCNATHMTLTIPEFPGKLKSVSFENQNIDVSQLHDNGIDLEATNGMKLHFSKTLLKTKLSEKCLLHQFYLASLKLTFLLRPETVSMVIYPECLCESPVSIVTGELCTQDGFMDVEVYSYQTQPALDLGTLRVGNSSCQPVFEAQSQGLVRFHIPLNGCGTRYKFEDDKVVYENEIHALWTDFPPSKISRDSEFRMTVKCSYSRNDMLLNINVESLTPPVASVKLGPFTLILQSYPDNSYQQPYGENEYPLVRFLRQPIYMEVRVLNRDDPNIKLVLDDCWATSTMDPDSFPQWNVVVDGCAYDLDNYQTTFHPVGSSVTHPDHYQRFDMKAFAFVSEAHVLSSLVYFHCSALICNRLSPDSPLCSVTCPVSSRHRRATGATEAEKMTVSLPGPILLLSDDSSFRGVGSSDLKASGSSGEKSRSETGEEVGSRGAMDTKGHKTAGDVGSKA

SEQ ID NO: 3140 - protein, 387 aa, synthetic construct
  REGION 1..387: note = ZP3 (P21754) SP+PP+ECD
MELSYRLFICLLLWGSTELCYPQPLWLLQGGASHPETSVQPVLVECQEATLMVMVSKDLFGTGKLIRAADLTLGPEACEPLVSMDTEDVVRFEVGLHECGNSMQVTDDALVYSTFLLHDPRPVGNLSIVRTNRAEIPIECRYPRQGNVSSQAILPTWLPFRTTVFSEEKLTFSLRLMEENWNAEKRSPTFHLGDAAHLQAEIHTGSHVPLRLFVDHCVATPTPDQNASPYHTIVDFHGCLVDGLTDASSAFKVPRPGPDTLQFTVDVFHFANDSRNMIYITCHLKVTLAEQDPDELNKACSFSKPSNSWFPVEGSADICQCCNKGDCGTPSHSRRQPHVMSQWSRSASRNRRHVTEEADVTVGPLIFLDRRGDHEVEQWALPSDTSV

SEQ ID NO: 3141 - protein, 505 aa, synthetic construct
  REGION 1..505: note = ZP4 (Q12836) SP+PP+ECD
MWLLRCVLLCVSLSLAVSGQHKPEAPDYSSVLHCGPWSFQFAVNLNQEATSPPVLIAWDNQGLLHELQNDSDCGTWIRKGPGSSVVLEATYSSCYVTEWDSHYIMPVGVEGAGAAEHKVVTERKLLKCPMDLLARDAPDTDWCDSIPARDRLPCAPSPISRGDCEGLGCCYSSEEVNSCYYGNTVTLHCTREGHFSIAVSRNVTSPPLLLDSVRLALRNDSACNPVMATQAFVLFQFPFTSCGTTRQITGDRAVYENELVATRDVKNGSRGSVTRDSIFRLHVSCSYSVSSNSLPINVQVFTLPPPFPETQPGPLTLELQIAKDKNYGSYYGVGDYPVVKLLRDPIYVEVSILHRTDPYLGLLLQQCWATPSTDPLSQPQWPILVKGCPYIGDNYQTQLIPVQKALDLPFPSHHQRFSIFTFSFVNPTVEKQALRGPVHLHCSVSVCQPAETPSCVVTCPDLSRRRNFDNSSQNTTASVSSKGPMILLQATKDPPEKLRVPVDSK

SEQ ID NO: 3142 - protein, 372 aa, synthetic construct
  REGION 1..372: note = ZPLD1 (Q8TCW7) SP+PP+ECD
MEQIWLLLLLTIRVLPGSAQFNGYNCDANLHSRFPAERDISVYCGVQAITMKINFCTVLFSGYSETDLALNGRHGDSHCRGFINNNTFPAVVIFIINLSTLEGCGNNLVVSTIPGVSAYGNATSVQVGNISGYIDTPDPPTIISYLPGLLYKFSCSYPLEYLVNNTQLASSSAAISVRENNGTFVSTLNLLLYNDSTYNQQLIIPSIGLPLKTKVFAAVQATNLDGRWNVLMDYCYTTPSGNPNDDIRYDLFLSCDKDPQTTVIENGRSQRGRFSFEVFRFVKHKNQKMSTVFLHCVTKLCRADDCPFLMPICSHRERRDAGRRTTWSPQSSSGSAVLSAGPIITRSDETPTNNSQLGSPSMPPFQLNAITS

SEQ ID NO: 3143 - protein, 8 aa, synthetic construct
  REGION 1..8: note = Gly-Ser Linker
GGGSGGGS

SEQ ID NO: 3144 - protein, 9 aa, synthetic construct
  REGION 1..9: note = Gly-Ser Linker
GGGSGGGSG

SEQ ID NO: 3145 - protein, 10 aa, synthetic construct
  REGION 1..10: note = Gly-Ser Linker
GGGSGGGSGG

SEQ ID NO: 3146 - protein, 11 aa, synthetic construct
  REGION 1..11: note = Gly-Ser Linker
GGGSGGGSGGG

SEQ ID NO: 3147 - protein, 12 aa, synthetic construct
  REGION 1..12: note = Gly-Ser Linker
GGGSGGGSGGGS

SEQ ID NO: 3148 - protein, 13 aa, synthetic construct
  REGION 1..13: note = Gly-Ser Linker
GGGSGGGSGGGSG

SEQ ID NO: 3149 - protein, 14 aa, synthetic construct
  REGION 1..14: note = Gly-Ser Linker
GGGSGGGSGGGSGG

SEQ ID NO: 3150 - protein, 15 aa, synthetic construct
  REGION 1..15: note = Gly-Ser Linker
GGGSGGGSGGGSGGG

SEQ ID NO: 3151 - protein, 16 aa, synthetic construct
  REGION 1..16: note = Gly-Ser Linker
GGGSGGGSGGGSGGGS

SEQ ID NO: 3152 - protein, 17 aa, synthetic construct
  REGION 1..17: note = Gly-Ser Linker
GGGSGGGSGGGSGGGSG

SEQ ID NO: 3153 - protein, 18 aa, synthetic construct
  REGION 1..18: note = Gly-Ser Linker
GGGSGGGSGGGSGGGSGG

SEQ ID NO: 3154 - protein, 19 aa, synthetic construct
  REGION 1..19: note = Gly-Ser Linker
GGGSGGGSGGGSGGGSGGG

SEQ ID NO: 3155 - protein, 20 aa, synthetic construct
  REGION 1..20: note = Gly-Ser Linker
GGGSGGGSGGGSGGGSGGGS

SEQ ID NO: 3156 - protein, 21 aa, synthetic construct
  REGION 1..21: note = Gly-Ser Linker
GGGSGGGSGGGSGGGSGGGSG

SEQ ID NO: 3157 - protein, 22 aa, synthetic construct
  REGION 1..22: note = Gly-Ser Linker
GGGSGGGSGGGSGGGSGGGSGG

SEQ ID NO: 3158 - protein, 23 aa, synthetic construct
  REGION 1..23: note = Gly-Ser Linker
GGGSGGGSGGGSGGGSGGGSGGG

SEQ ID NO: 3159 - protein, 24 aa, synthetic construct
  REGION 1..24: note = Gly-Ser Linker
GGGSGGGSGGGSGGGSGGGSGGGS

SEQ ID NO: 3160 - protein, 25 aa, synthetic construct
  REGION 1..25: note = Gly-Ser Linker
GGGSGGGSGGGSGGGSGGGSGGGSG

SEQ ID NO: 3161 - protein, 26 aa, synthetic construct
  REGION 1..26: note = Gly-Ser Linker
GGGSGGGSGGGSGGGSGGGSGGGSGG

SEQ ID NO: 3162 - protein, 27 aa, synthetic construct
  REGION 1..27: note = Gly-Ser Linker
GGGSGGGSGGGSGGGSGGGSGGGSGGG

SEQ ID NO: 3163 - protein, 5 aa, synthetic construct
  REGION 1..5: note = Gly-Ser Linker
GGGGS

SEQ ID NO: 3164 - protein, 6 aa, synthetic construct
  REGION 1..6: note = Gly-Ser Linker
GGGGSG

SEQ ID NO: 3165 - protein, 7 aa, synthetic construct
  REGION 1..7: note = Gly-Ser Linker
GGGGSGG

SEQ ID NO: 3166 - protein, 8 aa, synthetic construct
  REGION 1..8: note = Gly-Ser Linker
GGGGSGGG

SEQ ID NO: 3167 - protein, 10 aa, synthetic construct
  REGION 1..10: note = Gly-Ser Linker
GGGGSGGGGS

SEQ ID NO: 3168 - protein, 11 aa, synthetic construct
  REGION 1..11: note = Gly-Ser Linker
GGGGSGGGGSG

SEQ ID NO: 3169 - protein, 12 aa, synthetic construct
  REGION 1..12: note = Gly-Ser Linker
GGGGSGGGGSGG

SEQ ID NO: 3170 - protein, 13 aa, synthetic construct
  REGION 1..13: note = Gly-Ser Linker
GGGGSGGGGSGGG

SEQ ID NO: 3171 - protein, 15 aa, synthetic construct
  REGION 1..15: note = Gly-Ser Linker
GGGGSGGGGSGGGGS

SEQ ID NO: 3172 - protein, 16 aa, synthetic construct
  REGION 1..16: note = Gly-Ser Linker
GGGGSGGGGSGGGGSG

SEQ ID NO: 3173 - protein, 17 aa, synthetic construct
  REGION 1..17: note = Gly-Ser Linker
GGGGSGGGGSGGGGSGG

SEQ ID NO: 3174 - protein, 18 aa, synthetic construct
  REGION 1..18: note = Gly-Ser Linker
GGGGSGGGGSGGGGSGGG

SEQ ID NO: 3175 - protein, 20 aa, synthetic construct
  REGION 1..20: note = Gly-Ser Linker
GGGGSGGGGSGGGGSGGGGS

SEQ ID NO: 3176 - protein, 21 aa, synthetic construct
  REGION 1..21: note = Gly-Ser Linker
GGGGSGGGGSGGGGSGGGGSG

SEQ ID NO: 3177 - protein, 22 aa, synthetic construct
  REGION 1..22: note = Gly-Ser Linker
GGGGSGGGGSGGGGSGGGGSGG

SEQ ID NO: 3178 - protein, 23 aa, synthetic construct
  REGION 1..23: note = Gly-Ser Linker
GGGGSGGGGSGGGGSGGGGSGGG

SEQ ID NO: 3179 - protein, 25 aa, synthetic construct
  REGION 1..25: note = Gly-Ser Linker
GGGGSGGGGSGGGGSGGGGSGGGGS

SEQ ID NO: 3180 - protein, 26 aa, synthetic construct
  REGION 1..26: note = Gly-Ser Linker
GGGGSGGGGSGGGGSGGGGSGGGGSG

SEQ ID NO: 3181 - protein, 27 aa, synthetic construct
  REGION 1..27: note = Gly-Ser Linker
GGGGSGGGGSGGGGSGGGGSGGGGSGG

SEQ ID NO: 3182 - protein, 28 aa, synthetic construct
  REGION 1..28: note = Gly-Ser Linker
GGGGSGGGGSGGGGSGGGGSGGGGSGGG

SEQ ID NO: 3183 - protein, 4 aa, synthetic construct
  REGION 1..4: note = Gly-Ala Linker
GGGA

SEQ ID NO: 3184 - protein, 5 aa, synthetic construct
  REGION 1..5: note = Gly-Ala Linker
GGGAG

SEQ ID NO: 3185 - protein, 6 aa, synthetic construct
  REGION 1..6: note = Gly-Ala Linker
GGGAGG

SEQ ID NO: 3186 - protein, 7 aa, synthetic construct
  REGION 1..7: note = Gly-Ala Linker
GGGAGGG

SEQ ID NO: 3187 - protein, 8 aa, synthetic construct
  REGION 1..8: note = Gly-Ala Linker
GGGAGGGA

SEQ ID NO: 3188 - protein, 9 aa, synthetic construct
  REGION 1..9: note = Gly-Ala Linker
GGGAGGGAG

SEQ ID NO: 3189 - protein, 10 aa, synthetic construct
  REGION 1..10: note = Gly-Ala Linker
GGGAGGGAGG

SEQ ID NO: 3190 - protein, 11 aa, synthetic construct
  REGION 1..11: note = Gly-Ala Linker
GGGAGGGAGGG

SEQ ID NO: 3191 - protein, 12 aa, synthetic construct
  REGION 1..12: note = Gly-Ala Linker
GGGAGGGAGGGA

SEQ ID NO: 3192 - protein, 13 aa, synthetic construct
  REGION 1..13: note = Gly-Ala Linker
GGGAGGGAGGGAG

SEQ ID NO: 3193 - protein, 14 aa, synthetic construct
  REGION 1..14: note = Gly-Ala Linker
GGGAGGGAGGGAGG

SEQ ID NO: 3194 - protein, 15 aa, synthetic construct
  REGION 1..15: note = Gly-Ala Linker
GGGAGGGAGGGAGGG

SEQ ID NO: 3195 - protein, 16 aa, synthetic construct
  REGION 1..16: note = Gly-Ala Linker
GGGAGGGAGGGAGGGA

SEQ ID NO: 3196 - protein, 17 aa, synthetic construct
  REGION 1..17: note = Gly-Ala Linker
GGGAGGGAGGGAGGGAG

SEQ ID NO: 3197 - protein, 18 aa, synthetic construct
  REGION 1..18: note = Gly-Ala Linker
GGGAGGGAGGGAGGGAGG

SEQ ID NO: 3198 - protein, 19 aa, synthetic construct
  REGION 1..19: note = Gly-Ala Linker
GGGAGGGAGGGAGGGAGGG

SEQ ID NO: 3199 - protein, 20 aa, synthetic construct
  REGION 1..20: note = Gly-Ala Linker
GGGAGGGAGGGAGGGAGGGA

SEQ ID NO: 3200 - protein, 21 aa, synthetic construct
  REGION 1..21: note = Gly-Ala Linker
GGGAGGGAGGGAGGGAGGGAG

SEQ ID NO: 3201 - protein, 22 aa, synthetic construct
  REGION 1..22: note = Gly-Ala Linker
GGGAGGGAGGGAGGGAGGGAGG

SEQ ID NO: 3202 - protein, 23 aa, synthetic construct
  REGION 1..23: note = Gly-Ala Linker
GGGAGGGAGGGAGGGAGGGAGGG

SEQ ID NO: 3203 - protein, 24 aa, synthetic construct
  REGION 1..24: note = Gly-Ala Linker
GGGAGGGAGGGAGGGAGGGAGGGA

SEQ ID NO: 3204 - protein, 25 aa, synthetic construct
  REGION 1..25: note = Gly-Ala Linker
GGGAGGGAGGGAGGGAGGGAGGGAG

SEQ ID NO: 3205 - protein, 26 aa, synthetic construct
  REGION 1..26: note = Gly-Ala Linker
GGGAGGGAGGGAGGGAGGGAGGGAGG

SEQ ID NO: 3206 - protein, 27 aa, synthetic construct
  REGION 1..27: note = Gly-Ala Linker
GGGAGGGAGGGAGGGAGGGAGGGAGGG

SEQ ID NO: 3207 - protein, 5 aa, synthetic construct
  REGION 1..5: note = Gly-Ala Linker
GGGGA

SEQ ID NO: 3208 - protein, 6 aa, synthetic construct
  REGION 1..6: note = Gly-Ala Linker
GGGGAG

SEQ ID NO: 3209 - protein, 7 aa, synthetic construct
  REGION 1..7: note = Gly-Ala Linker
GGGGAGG

SEQ ID NO: 3210 - protein, 8 aa, synthetic construct
  REGION 1..8: note = Gly-Ala Linker
GGGGAGGG

SEQ ID NO: 3211 - protein, 10 aa, synthetic construct
  REGION 1..10: note = Gly-Ala Linker
GGGGAGGGGA

SEQ ID NO: 3212 - protein, 11 aa, synthetic construct
  REGION 1..11: note = Gly-Ala Linker
GGGGAGGGGAG

SEQ ID NO: 3213 - protein, 12 aa, synthetic construct
  REGION 1..12: note = Gly-Ala Linker
GGGGAGGGGAGG

SEQ ID NO: 3214 - protein, 13 aa, synthetic construct
  REGION 1..13: note = Gly-Ala Linker
GGGGAGGGGAGGG

SEQ ID NO: 3215 - protein, 15 aa, synthetic construct
  REGION 1..15: note = Gly-Ala Linker
GGGGAGGGGAGGGGA

SEQ ID NO: 3216 - protein, 16 aa, synthetic construct
  REGION 1..16: note = Gly-Ala Linker
GGGGAGGGGAGGGGAG

SEQ ID NO: 3217 - protein, 17 aa, synthetic construct
  REGION 1..17: note = Gly-Ala Linker
GGGGAGGGGAGGGGAGG

SEQ ID NO: 3218 - protein, 18 aa, synthetic construct
  REGION 1..18: note = Gly-Ala Linker
GGGGAGGGGAGGGGAGGG

SEQ ID NO: 3219 - protein, 20 aa, synthetic construct
  REGION 1..20: note = Gly-Ala Linker
GGGGAGGGGAGGGGAGGGGA

SEQ ID NO: 3220 - protein, 21 aa, synthetic construct
  REGION 1..21: note = Gly-Ala Linker
GGGGAGGGGAGGGGAGGGGAG

SEQ ID NO: 3221 - protein, 22 aa, synthetic construct
  REGION 1..22: note = Gly-Ala Linker
GGGGAGGGGAGGGGAGGGGAGG

SEQ ID NO: 3222 - protein, 23 aa, synthetic construct
  REGION 1..23: note = Gly-Ala Linker
GGGGAGGGGAGGGGAGGGGAGGG

SEQ ID NO: 3223 - protein, 25 aa, synthetic construct
  REGION 1..25: note = Gly-Ala Linker
GGGGAGGGGAGGGGAGGGGAGGGGA

SEQ ID NO: 3224 - protein, 26 aa, synthetic construct
  REGION 1..26: note = Gly-Ala Linker
GGGGAGGGGAGGGGAGGGGAGGGGAG

SEQ ID NO: 3225 - protein, 27 aa, synthetic construct
  REGION 1..27: note = Gly-Ala Linker
GGGGAGGGGAGGGGAGGGGAGGGGAGG

SEQ ID NO: 3226 - protein, 28 aa, synthetic construct
  REGION 1..28: note = Gly-Ala Linker
GGGGAGGGGAGGGGAGGGGAGGGGAGGG

SEQ ID NO: 3227 - protein, 57 aa, synthetic construct
  REGION 1..57: note = TNR1B Linker (1-57)
TSTSPTRSMAPGAVHLPQPVSTRSQHTQPTPEPSTAPSTSFLLPMGPSPPAEGSTGD

SEQ ID NO: 3228 - protein, 56 aa, synthetic construct
  REGION 1..56: note = TNR1B Linker (2-57)
STSPTRSMAPGAVHLPQPVSTRSQHTQPTPEPSTAPSTSFLLPMGPSPPAEGSTGD

SEQ ID NO: 3229 - protein, 55 aa, synthetic construct
  REGION 1..55: note = TNR1B Linker (3-57)
TSPTRSMAPGAVHLPQPVSTRSQHTQPTPEPSTAPSTSFLLPMGPSPPAEGSTGD

SEQ ID NO: 3230 - protein, 54 aa, synthetic construct
  REGION 1..54: note = TNR1B Linker (4-57)
SPTRSMAPGAVHLPQPVSTRSQHTQPTPEPSTAPSTSFLLPMGPSPPAEGSTGD

SEQ ID NO: 3231 - protein, 53 aa, synthetic construct
  REGION 1..53: note = TNR1B Linker (5-57)
PTRSMAPGAVHLPQPVSTRSQHTQPTPEPSTAPSTSFLLPMGPSPPAEGSTGD

SEQ ID NO: 3232 - protein, 52 aa, synthetic construct
  REGION 1..52: note = TNR1B Linker (6-57)
TRSMAPGAVHLPQPVSTRSQHTQPTPEPSTAPSTSFLLPMGPSPPAEGSTGD

SEQ ID NO: 3233 - protein, 51 aa, synthetic construct
  REGION 1..51: note = TNR1B Linker (7-57)
RSMAPGAVHLPQPVSTRSQHTQPTPEPSTAPSTSFLLPMGPSPPAEGSTGD

SEQ ID NO: 3234 - protein, 50 aa, synthetic construct
  REGION 1..50: note = TNR1B Linker (8-57)
SMAPGAVHLPQPVSTRSQHTQPTPEPSTAPSTSFLLPMGPSPPAEGSTGD

SEQ ID NO: 3235 - protein, 49 aa, synthetic construct
  REGION 1..49: note = TNR1B Linker (9-57)
MAPGAVHLPQPVSTRSQHTQPTPEPSTAPSTSFLLPMGPSPPAEGSTGD

SEQ ID NO: 3236 - protein, 48 aa, synthetic construct
  REGION 1..48: note = TNR1B Linker (10-57)
APGAVHLPQPVSTRSQHTQPTPEPSTAPSTSFLLPMGPSPPAEGSTGD

SEQ ID NO: 3237 - protein, 47 aa, synthetic construct
  REGION 1..47: note = TNR1B Linker (11-57)
PGAVHLPQPVSTRSQHTQPTPEPSTAPSTSFLLPMGPSPPAEGSTGD

SEQ ID NO: 3238 - protein, 46 aa, synthetic construct
  REGION 1..46: note = TNR1B Linker (12-57)
GAVHLPQPVSTRSQHTQPTPEPSTAPSTSFLLPMGPSPPAEGSTGD

SEQ ID NO: 3239 - protein, 45 aa, synthetic construct
  REGION 1..45: note = TNR1B Linker (13-57)
AVHLPQPVSTRSQHTQPTPEPSTAPSTSFLLPMGPSPPAEGSTGD

SEQ ID NO: 3240 - protein, 44 aa, synthetic construct
  REGION 1..44: note = TNR1B Linker (14-57)
VHLPQPVSTRSQHTQPTPEPSTAPSTSFLLPMGPSPPAEGSTGD

SEQ ID NO: 3241 - protein, 43 aa, synthetic construct
  REGION 1..43: note = TNR1B Linker (15-57)
HLPQPVSTRSQHTQPTPEPSTAPSTSFLLPMGPSPPAEGSTGD

SEQ ID NO: 3242 - protein, 42 aa, synthetic construct
  REGION 1..42: note = TNR1B Linker (16-57)
LPQPVSTRSQHTQPTPEPSTAPSTSFLLPMGPSPPAEGSTGD

SEQ ID NO: 3243 - protein, 41 aa, synthetic construct
  REGION 1..41: note = TNR1B Linker (17-57)
PQPVSTRSQHTQPTPEPSTAPSTSFLLPMGPSPPAEGSTGD

SEQ ID NO: 3244 - protein, 40 aa, synthetic construct
  REGION 1..40: note = TNR1B Linker (18-57)
QPVSTRSQHTQPTPEPSTAPSTSFLLPMGPSPPAEGSTGD

SEQ ID NO: 3245 - protein, 39 aa, synthetic construct
  REGION 1..39: note = TNR1B Linker (19-57)
PVSTRSQHTQPTPEPSTAPSTSFLLPMGPSPPAEGSTGD

SEQ ID NO: 3246 - protein, 38 aa, synthetic construct
  REGION 1..38: note = TNR1B Linker (20-57)
VSTRSQHTQPTPEPSTAPSTSFLLPMGPSPPAEGSTGD

SEQ ID NO: 3247 - protein, 37 aa, synthetic construct
  REGION 1..37: note = TNR1B Linker (21-57)
STRSQHTQPTPEPSTAPSTSFLLPMGPSPPAEGSTGD

SEQ ID NO: 3248 - protein, 36 aa, synthetic construct
  REGION 1..36: note = TNR1B Linker (22-57)
TRSQHTQPTPEPSTAPSTSFLLPMGPSPPAEGSTGD

SEQ ID NO: 3249 - protein, 35 aa, synthetic construct
  REGION 1..35: note = TNR1B Linker (23-57)
RSQHTQPTPEPSTAPSTSFLLPMGPSPPAEGSTGD

SEQ ID NO: 3250 - protein, 34 aa, synthetic construct
  REGION 1..34: note = TNR1B Linker (24-57)
SQHTQPTPEPSTAPSTSFLLPMGPSPPAEGSTGD

SEQ ID NO: 3251 - protein, 33 aa, synthetic construct
  REGION 1..33: note = TNR1B Linker (25-57)
QHTQPTPEPSTAPSTSFLLPMGPSPPAEGSTGD

SEQ ID NO: 3252 - protein, 32 aa, synthetic construct
  REGION 1..32: note = TNR1B Linker (26-57)
HTQPTPEPSTAPSTSFLLPMGPSPPAEGSTGD

SEQ ID NO: 3253 - protein, 31 aa, synthetic construct
  REGION 1..31: note = TNR1B Linker (27-57)
TQPTPEPSTAPSTSFLLPMGPSPPAEGSTGD

SEQ ID NO: 3254 - protein, 30 aa, synthetic construct
  REGION 1..30: note = TNR1B Linker (28-57)
QPTPEPSTAPSTSFLLPMGPSPPAEGSTGD

SEQ ID NO: 3255 - protein, 29 aa, synthetic construct
  REGION 1..29: note = TNR1B Linker (29-57)
PTPEPSTAPSTSFLLPMGPSPPAEGSTGD

SEQ ID NO: 3256 - protein, 28 aa, synthetic construct
  REGION 1..28: note = TNR1B Linker (30-57)
TPEPSTAPSTSFLLPMGPSPPAEGSTGD

SEQ ID NO: 3257 - protein, 27 aa, synthetic construct
  REGION 1..27: note = TNR1B Linker (31-57)
PEPSTAPSTSFLLPMGPSPPAEGSTGD

SEQ ID NO: 3258 - protein, 26 aa, synthetic construct
  REGION 1..26: note = TNR1B Linker (32-57)
EPSTAPSTSFLLPMGPSPPAEGSTGD

SEQ ID NO: 3259 - protein, 25 aa, synthetic construct
  REGION 1..25: note = TNR1B Linker (33-57)
PSTAPSTSFLLPMGPSPPAEGSTGD

SEQ ID NO: 3260 - protein, 24 aa, synthetic construct
  REGION 1..24: note = TNR1B Linker (34-57)
STAPSTSFLLPMGPSPPAEGSTGD

SEQ ID NO: 3261 - protein, 23 aa, synthetic construct
  REGION 1..23: note = TNR1B Linker (35-57)
TAPSTSFLLPMGPSPPAEGSTGD

SEQ ID NO: 3262 - protein, 22 aa, synthetic construct
  REGION 1..22: note = TNR1B Linker (36-57)
APSTSFLLPMGPSPPAEGSTGD

SEQ ID NO: 3263 - protein, 21 aa, synthetic construct
  REGION 1..21: note = TNR1B Linker (37-57)
PSTSFLLPMGPSPPAEGSTGD

SEQ ID NO: 3264 - protein, 20 aa, synthetic construct
  REGION 1..20: note = TNR1B Linker (38-57)
STSFLLPMGPSPPAEGSTGD

SEQ ID NO: 3265 - protein, 19 aa, synthetic construct
  REGION 1..19: note = TNR1B Linker (39-57)
TSFLLPMGPSPPAEGSTGD

SEQ ID NO: 3266 - protein, 18 aa, synthetic construct
  REGION 1..18: note = TNR1B Linker (40-57)
SFLLPMGPSPPAEGSTGD

SEQ ID NO: 3267 - protein, 17 aa, synthetic construct
  REGION 1..17: note = TNR1B Linker (41-57)
FLLPMGPSPPAEGSTGD

SEQ ID NO: 3268 - protein, 16 aa, synthetic construct
  REGION 1..16: note = TNR1B Linker (42-57)
LLPMGPSPPAEGSTGD

SEQ ID NO: 3269 - protein, 15 aa, synthetic construct
  REGION 1..15: note = TNR1B Linker (43-57)
LPMGPSPPAEGSTGD

SEQ ID NO: 3270 - protein, 14 aa, synthetic construct
  REGION 1..14: note = TNR1B Linker (44-57)
PMGPSPPAEGSTGD

SEQ ID NO: 3271 - protein, 13 aa, synthetic construct
  REGION 1..13: note = TNR1B Linker (45-57)
MGPSPPAEGSTGD

SEQ ID NO: 3272 - protein, 12 aa, synthetic construct
  REGION 1..12: note = TNR1B Linker (46-57)
GPSPPAEGSTGD

SEQ ID NO: 3273 - protein, 11 aa, synthetic construct
  REGION 1..11: note = TNR1B Linker (47-57)
PSPPAEGSTGD

SEQ ID NO: 3274 - protein, 10 aa, synthetic construct
  REGION 1..10: note = TNR1B Linker (48-57)
SPPAEGSTGD

SEQ ID NO: 3275 - protein, 9 aa, synthetic construct
  REGION 1..9: note = TNR1B Linker (49-57)
PPAEGSTGD

SEQ ID NO: 3276 - protein, 8 aa, synthetic construct
  REGION 1..8: note = TNR1B Linker (50-57)
PAEGSTGD

SEQ ID NO: 3277 - protein, 7 aa, synthetic construct
  REGION 1..7: note = TNR1B Linker (51-57)
AEGSTGD

SEQ ID NO: 3278 - protein, 6 aa, synthetic construct
  REGION 1..6: note = TNR1B Linker (52-57)
EGSTGD

SEQ ID NO: 3279 - protein, 5 aa, synthetic construct
  REGION 1..5: note = TNR1B Linker (53-57)
GSTGD

SEQ ID NO: 3280 - protein, 56 aa, synthetic construct
  REGION 1..56: note = TNR1B Linker (1-56)
TSTSPTRSMAPGAVHLPQPVSTRSQHTQPTPEPSTAPSTSFLLPMGPSPPAEGSTG

SEQ ID NO: 3281 - protein, 55 aa, synthetic construct
  REGION 1..55: note = TNR1B Linker (2-56)
STSPTRSMAPGAVHLPQPVSTRSQHTQPTPEPSTAPSTSFLLPMGPSPPAEGSTG

SEQ ID NO: 3282 - protein, 54 aa, synthetic construct
  REGION 1..54: note = TNR1B Linker (3-56)
TSPTRSMAPGAVHLPQPVSTRSQHTQPTPEPSTAPSTSFLLPMGPSPPAEGSTG

SEQ ID NO: 3283 - protein, 53 aa, synthetic construct
  REGION 1..53: note = TNR1B Linker (4-56)
SPTRSMAPGAVHLPQPVSTRSQHTQPTPEPSTAPSTSFLLPMGPSPPAEGSTG

SEQ ID NO: 3284 - protein, 52 aa, synthetic construct
  REGION 1..52: note = TNR1B Linker (5-56)
PTRSMAPGAVHLPQPVSTRSQHTQPTPEPSTAPSTSFLLPMGPSPPAEGSTG

SEQ ID NO: 3285 - protein, 51 aa, synthetic construct
  REGION 1..51: note = TNR1B Linker (6-56)
TRSMAPGAVHLPQPVSTRSQHTQPTPEPSTAPSTSFLLPMGPSPPAEGSTG

SEQ ID NO: 3286 - protein, 50 aa, synthetic construct
  REGION 1..50: note = TNR1B Linker (7-56)
RSMAPGAVHLPQPVSTRSQHTQPTPEPSTAPSTSFLLPMGPSPPAEGSTG

SEQ ID NO: 3287 - protein, 49 aa, synthetic construct
  REGION 1..49: note = TNR1B Linker (8-56)
SMAPGAVHLPQPVSTRSQHTQPTPEPSTAPSTSFLLPMGPSPPAEGSTG

SEQ ID NO: 3288 - protein, 48 aa, synthetic construct
  REGION 1..48: note = TNR1B Linker (9-56)
MAPGAVHLPQPVSTRSQHTQPTPEPSTAPSTSFLLPMGPSPPAEGSTG

SEQ ID NO: 3289 - protein, 47 aa, synthetic construct
  REGION 1..47: note = TNR1B Linker (10-56)
APGAVHLPQPVSTRSQHTQPTPEPSTAPSTSFLLPMGPSPPAEGSTG

SEQ ID NO: 3290 - protein, 46 aa, synthetic construct
  REGION 1..46: note = TNR1B Linker (11-56)
PGAVHLPQPVSTRSQHTQPTPEPSTAPSTSFLLPMGPSPPAEGSTG

SEQ ID NO: 3291 - protein, 45 aa, synthetic construct
  REGION 1..45: note = TNR1B Linker (12-56)
GAVHLPQPVSTRSQHTQPTPEPSTAPSTSFLLPMGPSPPAEGSTG

SEQ ID NO: 3292 - protein, 44 aa, synthetic construct
  REGION 1..44: note = TNR1B Linker (13-56)
AVHLPQPVSTRSQHTQPTPEPSTAPSTSFLLPMGPSPPAEGSTG

SEQ ID NO: 3293 - protein, 43 aa, synthetic construct
  REGION 1..43: note = TNR1B Linker (14-56)
VHLPQPVSTRSQHTQPTPEPSTAPSTSFLLPMGPSPPAEGSTG

SEQ ID NO: 3294 - protein, 42 aa, synthetic construct
  REGION 1..42: note = TNR1B Linker (15-56)
HLPQPVSTRSQHTQPTPEPSTAPSTSFLLPMGPSPPAEGSTG

SEQ ID NO: 3295 - protein, 41 aa, synthetic construct
  REGION 1..41: note = TNR1B Linker (16-56)
LPQPVSTRSQHTQPTPEPSTAPSTSFLLPMGPSPPAEGSTG

SEQ ID NO: 3296 - protein, 40 aa, synthetic construct
  REGION 1..40: note = TNR1B Linker (17-56)
PQPVSTRSQHTQPTPEPSTAPSTSFLLPMGPSPPAEGSTG

SEQ ID NO: 3297 - protein, 39 aa, synthetic construct
  REGION 1..39: note = TNR1B Linker (18-56)
QPVSTRSQHTQPTPEPSTAPSTSFLLPMGPSPPAEGSTG

SEQ ID NO: 3298 - protein, 38 aa, synthetic construct
  REGION 1..38: note = TNR1B Linker (19-56)
PVSTRSQHTQPTPEPSTAPSTSFLLPMGPSPPAEGSTG

SEQ ID NO: 3299 - protein, 37 aa, synthetic construct
  REGION 1..37: note = TNR1B Linker (20-56)
VSTRSQHTQPTPEPSTAPSTSFLLPMGPSPPAEGSTG

SEQ ID NO: 3300 - protein, 36 aa, synthetic construct
  REGION 1..36: note = TNR1B Linker (21-56)
STRSQHTQPTPEPSTAPSTSFLLPMGPSPPAEGSTG

SEQ ID NO: 3301 - protein, 35 aa, synthetic construct
  REGION 1..35: note = TNR1B Linker (22-56)
TRSQHTQPTPEPSTAPSTSFLLPMGPSPPAEGSTG

SEQ ID NO: 3302 - protein, 34 aa, synthetic construct
  REGION 1..34: note = TNR1B Linker (23-56)
RSQHTQPTPEPSTAPSTSFLLPMGPSPPAEGSTG

SEQ ID NO: 3303 - protein, 33 aa, synthetic construct
  REGION 1..33: note = TNR1B Linker (24-56)
SQHTQPTPEPSTAPSTSFLLPMGPSPPAEGSTG

SEQ ID NO: 3304 - protein, 32 aa, synthetic construct
  REGION 1..32: note = TNR1B Linker (25-56)
QHTQPTPEPSTAPSTSFLLPMGPSPPAEGSTG

SEQ ID NO: 3305 - protein, 31 aa, synthetic construct
  REGION 1..31: note = TNR1B Linker (26-56)
HTQPTPEPSTAPSTSFLLPMGPSPPAEGSTG

SEQ ID NO: 3306 - protein, 30 aa, synthetic construct
  REGION 1..30: note = TNR1B Linker (27-56)
TQPTPEPSTAPSTSFLLPMGPSPPAEGSTG

SEQ ID NO: 3307 - protein, 29 aa, synthetic construct
  REGION 1..29: note = TNR1B Linker (28-56)
QPTPEPSTAPSTSFLLPMGPSPPAEGSTG

SEQ ID NO: 3308 - protein, 28 aa, synthetic construct
  REGION 1..28: note = TNR1B Linker (29-56)
PTPEPSTAPSTSFLLPMGPSPPAEGSTG

SEQ ID NO: 3309 - protein, 27 aa, synthetic construct
  REGION 1..27: note = TNR1B Linker (30-56)
TPEPSTAPSTSFLLPMGPSPPAEGSTG

SEQ ID NO: 3310 - protein, 26 aa, synthetic construct
  REGION 1..26: note = TNR1B Linker (31-56)
PEPSTAPSTSFLLPMGPSPPAEGSTG

SEQ ID NO: 3311 - protein, 25 aa, synthetic construct
  REGION 1..25: note = TNR1B Linker (32-56)
EPSTAPSTSFLLPMGPSPPAEGSTG

SEQ ID NO: 3312 - protein, 24 aa, synthetic construct
  REGION 1..24: note = TNR1B Linker (33-56)
PSTAPSTSFLLPMGPSPPAEGSTG

SEQ ID NO: 3313 - protein, 23 aa, synthetic construct
  REGION 1..23: note = TNR1B Linker (34-56)
STAPSTSFLLPMGPSPPAEGSTG

SEQ ID NO: 3314 - protein, 22 aa, synthetic construct
  REGION 1..22: note = TNR1B Linker (35-56)
TAPSTSFLLPMGPSPPAEGSTG

SEQ ID NO: 3315 - protein, 21 aa, synthetic construct
  REGION 1..21: note = TNR1B Linker (36-56)
APSTSFLLPMGPSPPAEGSTG

SEQ ID NO: 3316 - protein, 20 aa, synthetic construct
  REGION 1..20: note = TNR1B Linker (37-56)
PSTSFLLPMGPSPPAEGSTG

SEQ ID NO: 3317 - protein, 19 aa, synthetic construct
  REGION 1..19: note = TNR1B Linker (38-56)
STSFLLPMGPSPPAEGSTG

SEQ ID NO: 3318 - protein, 18 aa, synthetic construct
  REGION 1..18: note = TNR1B Linker (39-56)
TSFLLPMGPSPPAEGSTG

SEQ ID NO: 3319 - protein, 17 aa, synthetic construct
  REGION 1..17: note = TNR1B Linker (40-56)
SFLLPMGPSPPAEGSTG

SEQ ID NO: 3320 - protein, 16 aa, synthetic construct
  REGION 1..16: note = TNR1B Linker (41-56)
FLLPMGPSPPAEGSTG

SEQ ID NO: 3321 - protein, 15 aa, synthetic construct
  REGION 1..15: note = TNR1B Linker (42-56)
LLPMGPSPPAEGSTG

SEQ ID NO: 3322 - protein, 14 aa, synthetic construct
  REGION 1..14: note = TNR1B Linker (43-56)
LPMGPSPPAEGSTG

SEQ ID NO: 3323 - protein, 13 aa, synthetic construct
  REGION 1..13: note = TNR1B Linker (44-56)
PMGPSPPAEGSTG

SEQ ID NO: 3324 - protein, 12 aa, synthetic construct
  REGION 1..12: note = TNR1B Linker (45-56)
MGPSPPAEGSTG

SEQ ID NO: 3325 - protein, 11 aa, synthetic construct
  REGION 1..11: note = TNR1B Linker (46-56)
GPSPPAEGSTG

SEQ ID NO: 3326 - protein, 10 aa, synthetic construct
  REGION 1..10: note = TNR1B Linker (47-56)
PSPPAEGSTG

SEQ ID NO: 3327 - protein, 9 aa, synthetic construct
  REGION 1..9: note = TNR1B Linker (48-56)
SPPAEGSTG

SEQ ID NO: 3328 - protein, 8 aa, synthetic construct
  REGION 1..8: note = TNR1B Linker (49-56)
PPAEGSTG

SEQ ID NO: 3329 - protein, 7 aa, synthetic construct
  REGION 1..7: note = TNR1B Linker (50-56)
PAEGSTG

SEQ ID NO: 3330 - protein, 6 aa, synthetic construct
  REGION 1..6: note = TNR1B Linker (51-56)
AEGSTG

SEQ ID NO: 3331 - protein, 5 aa, synthetic construct
  REGION 1..5: note = TNR1B Linker (52-56)
EGSTG

SEQ ID NO: 3332 - protein, 55 aa, synthetic construct
  REGION 1..55: note = TNR1B Linker (1-55)
TSTSPTRSMAPGAVHLPQPVSTRSQHTQPTPEPSTAPSTSFLLPMGPSPPAEGST

SEQ ID NO: 3333 - protein, 54 aa, synthetic construct
  REGION 1..54: note = TNR1B Linker (2-55)
STSPTRSMAPGAVHLPQPVSTRSQHTQPTPEPSTAPSTSFLLPMGPSPPAEGST

SEQ ID NO: 3334 - protein, 53 aa, synthetic construct
  REGION 1..53: note = TNR1B Linker (3-55)
TSPTRSMAPGAVHLPQPVSTRSQHTQPTPEPSTAPSTSFLLPMGPSPPAEGST

SEQ ID NO: 3335 - protein, 52 aa, synthetic construct
  REGION 1..52: note = TNR1B Linker (4-55)
SPTRSMAPGAVHLPQPVSTRSQHTQPTPEPSTAPSTSFLLPMGPSPPAEGST

SEQ ID NO: 3336 - protein, 51 aa, synthetic construct
  REGION 1..51: note = TNR1B Linker (5-55)
PTRSMAPGAVHLPQPVSTRSQHTQPTPEPSTAPSTSFLLPMGPSPPAEGST

SEQ ID NO: 3337 - protein, 50 aa, synthetic construct
  REGION 1..50: note = TNR1B Linker (6-55)
TRSMAPGAVHLPQPVSTRSQHTQPTPEPSTAPSTSFLLPMGPSPPAEGST

SEQ ID NO: 3338 - protein, 49 aa, synthetic construct
  REGION 1..49: note = TNR1B Linker (7-55)
RSMAPGAVHLPQPVSTRSQHTQPTPEPSTAPSTSFLLPMGPSPPAEGST

SEQ ID NO: 3339 - protein, 48 aa, synthetic construct
  REGION 1..48: note = TNR1B Linker (8-55)
SMAPGAVHLPQPVSTRSQHTQPTPEPSTAPSTSFLLPMGPSPPAEGST

SEQ ID NO: 3340 - protein, 47 aa, synthetic construct
  REGION 1..47: note = TNR1B Linker (9-55)
MAPGAVHLPQPVSTRSQHTQPTPEPSTAPSTSFLLPMGPSPPAEGST

SEQ ID NO: 3341 - protein, 46 aa, synthetic construct
  REGION 1..46: note = TNR1B Linker (10-55)
APGAVHLPQPVSTRSQHTQPTPEPSTAPSTSFLLPMGPSPPAEGST

SEQ ID NO: 3342 - protein, 45 aa, synthetic construct
  REGION 1..45: note = TNR1B Linker (11-55)
PGAVHLPQPVSTRSQHTQPTPEPSTAPSTSFLLPMGPSPPAEGST

SEQ ID NO: 3343 - protein, 44 aa, synthetic construct
  REGION 1..44: note = TNR1B Linker (12-55)
GAVHLPQPVSTRSQHTQPTPEPSTAPSTSFLLPMGPSPPAEGST

SEQ ID NO: 3344 - protein, 43 aa, synthetic construct
  REGION 1..43: note = TNR1B Linker (13-55)
AVHLPQPVSTRSQHTQPTPEPSTAPSTSFLLPMGPSPPAEGST

SEQ ID NO: 3345 - protein, 42 aa, synthetic construct
  REGION 1..42: note = TNR1B Linker (14-55)
VHLPQPVSTRSQHTQPTPEPSTAPSTSFLLPMGPSPPAEGST

SEQ ID NO: 3346 - protein, 41 aa, synthetic construct
  REGION 1..41: note = TNR1B Linker (15-55)
HLPQPVSTRSQHTQPTPEPSTAPSTSFLLPMGPSPPAEGST

SEQ ID NO: 3347 - protein, 40 aa, synthetic construct
  REGION 1..40: note = TNR1B Linker (16-55)
LPQPVSTRSQHTQPTPEPSTAPSTSFLLPMGPSPPAEGST

SEQ ID NO: 3348 - protein, 39 aa, synthetic construct
  REGION 1..39: note = TNR1B Linker (17-55)
PQPVSTRSQHTQPTPEPSTAPSTSFLLPMGPSPPAEGST

SEQ ID NO: 3349 - protein, 38 aa, synthetic construct
  REGION 1..38: note = TNR1B Linker (18-55)
QPVSTRSQHTQPTPEPSTAPSTSFLLPMGPSPPAEGST

SEQ ID NO: 3350 - protein, 37 aa, synthetic construct
  REGION 1..37: note = TNR1B Linker (19-55)
PVSTRSQHTQPTPEPSTAPSTSFLLPMGPSPPAEGST

SEQ ID NO: 3351 - protein, 36 aa, synthetic construct
  REGION 1..36: note = TNR1B Linker (20-55)
VSTRSQHTQPTPEPSTAPSTSFLLPMGPSPPAEGST

SEQ ID NO: 3352 - protein, 35 aa, synthetic construct
  REGION 1..35: note = TNR1B Linker (21-55)
STRSQHTQPTPEPSTAPSTSFLLPMGPSPPAEGST

SEQ ID NO: 3353 - protein, 34 aa, synthetic construct
  REGION 1..34: note = TNR1B Linker (22-55)
TRSQHTQPTPEPSTAPSTSFLLPMGPSPPAEGST

SEQ ID NO: 3354 - protein, 33 aa, synthetic construct
  REGION 1..33: note = TNR1B Linker (23-55)
RSQHTQPTPEPSTAPSTSFLLPMGPSPPAEGST

SEQ ID NO: 3355 - protein, 32 aa, synthetic construct
  REGION 1..32: note = TNR1B Linker (24-55)
SQHTQPTPEPSTAPSTSFLLPMGPSPPAEGST

SEQ ID NO: 3356 - protein, 31 aa, synthetic construct
  REGION 1..31: note = TNR1B Linker (25-55)
QHTQPTPEPSTAPSTSFLLPMGPSPPAEGST

SEQ ID NO: 3357 - protein, 30 aa, synthetic construct
  REGION 1..30: note = TNR1B Linker (26-55)
HTQPTPEPSTAPSTSFLLPMGPSPPAEGST

SEQ ID NO: 3358 - protein, 29 aa, synthetic construct
  REGION 1..29: note = TNR1B Linker (27-55)
TQPTPEPSTAPSTSFLLPMGPSPPAEGST

SEQ ID NO: 3359 - protein, 28 aa, synthetic construct
  REGION 1..28: note = TNR1B Linker (28-55)
QPTPEPSTAPSTSFLLPMGPSPPAEGST

SEQ ID NO: 3360 - protein, 27 aa, synthetic construct
  REGION 1..27: note = TNR1B Linker (29-55)
PTPEPSTAPSTSFLLPMGPSPPAEGST

SEQ ID NO: 3361 - protein, 26 aa, synthetic construct
  REGION 1..26: note = TNR1B Linker (30-55)
TPEPSTAPSTSFLLPMGPSPPAEGST

SEQ ID NO: 3362 - protein, 25 aa, synthetic construct
  REGION 1..25: note = TNR1B Linker (31-55)
PEPSTAPSTSFLLPMGPSPPAEGST

SEQ ID NO: 3363 - protein, 24 aa, synthetic construct
  REGION 1..24: note = TNR1B Linker (32-55)
EPSTAPSTSFLLPMGPSPPAEGST

SEQ ID NO: 3364 - protein, 23 aa, synthetic construct
  REGION 1..23: note = TNR1B Linker (33-55)
PSTAPSTSFLLPMGPSPPAEGST

SEQ ID NO: 3365 - protein, 22 aa, synthetic construct
  REGION 1..22: note = TNR1B Linker (34-55)
STAPSTSFLLPMGPSPPAEGST

SEQ ID NO: 3366 - protein, 21 aa, synthetic construct
  REGION 1..21: note = TNR1B Linker (35-55)
TAPSTSFLLPMGPSPPAEGST

SEQ ID NO: 3367 - protein, 20 aa, synthetic construct
  REGION 1..20: note = TNR1B Linker (36-55)
APSTSFLLPMGPSPPAEGST

SEQ ID NO: 3368 - protein, 19 aa, synthetic construct
  REGION 1..19: note = TNR1B Linker (37-55)
PSTSFLLPMGPSPPAEGST

SEQ ID NO: 3369 - protein, 18 aa, synthetic construct
  REGION 1..18: note = TNR1B Linker (38-55)
STSFLLPMGPSPPAEGST

SEQ ID NO: 3370 - protein, 17 aa, synthetic construct
  REGION 1..17: note = TNR1B Linker (39-55)
TSFLLPMGPSPPAEGST

SEQ ID NO: 3371 - protein, 16 aa, synthetic construct
  REGION 1..16: note = TNR1B Linker (40-55)
SFLLPMGPSPPAEGST

SEQ ID NO: 3372 - protein, 15 aa, synthetic construct
  REGION 1..15: note = TNR1B Linker (41-55)
FLLPMGPSPPAEGST

SEQ ID NO: 3373 - protein, 14 aa, synthetic construct
  REGION 1..14: note = TNR1B Linker (42-55)
LLPMGPSPPAEGST

SEQ ID NO: 3374 - protein, 13 aa, synthetic construct
  REGION 1..13: note = TNR1B Linker (43-55)
LPMGPSPPAEGST

SEQ ID NO: 3375 - protein, 12 aa, synthetic construct
  REGION 1..12: note = TNR1B Linker (44-55)
PMGPSPPAEGST

SEQ ID NO: 3376 - protein, 11 aa, synthetic construct
  REGION 1..11: note = TNR1B Linker (45-55)
MGPSPPAEGST

SEQ ID NO: 3377 - protein, 10 aa, synthetic construct
  REGION 1..10: note = TNR1B Linker (46-55)
GPSPPAEGST

SEQ ID NO: 3378 - protein, 9 aa, synthetic construct
  REGION 1..9: note = TNR1B Linker (47-55)
PSPPAEGST

SEQ ID NO: 3379 - protein, 8 aa, synthetic construct
  REGION 1..8: note = TNR1B Linker (48-55)
SPPAEGST

SEQ ID NO: 3380 - protein, 7 aa, synthetic construct
  REGION 1..7: note = TNR1B Linker (49-55)
PPAEGST

SEQ ID NO: 3381 - protein, 6 aa, synthetic construct
  REGION 1..6: note = TNR1B Linker (50-55)
PAEGST

SEQ ID NO: 3382 - protein, 5 aa, synthetic construct
  REGION 1..5: note = TNR1B Linker (51-55)
AEGST

SEQ ID NO: 3383 - protein, 54 aa, synthetic construct
  REGION 1..54: note = TNR1B Linker (1-54)
TSTSPTRSMAPGAVHLPQPVSTRSQHTQPTPEPSTAPSTSFLLPMGPSPPAEGS

SEQ ID NO: 3384 - protein, 53 aa, synthetic construct
  REGION 1..53: note = TNR1B Linker (2-54)
STSPTRSMAPGAVHLPQPVSTRSQHTQPTPEPSTAPSTSFLLPMGPSPPAEGS

SEQ ID NO: 3385 - protein, 52 aa, synthetic construct
  REGION 1..52: note = TNR1B Linker (3-54)
TSPTRSMAPGAVHLPQPVSTRSQHTQPTPEPSTAPSTSFLLPMGPSPPAEGS

SEQ ID NO: 3386 - protein, 51 aa, synthetic construct
  REGION 1..51: note = TNR1B Linker (4-54)
SPTRSMAPGAVHLPQPVSTRSQHTQPTPEPSTAPSTSFLLPMGPSPPAEGS

SEQ ID NO: 3387 - protein, 50 aa, synthetic construct
  REGION 1..50: note = TNR1B Linker (5-54)
PTRSMAPGAVHLPQPVSTRSQHTQPTPEPSTAPSTSFLLPMGPSPPAEGS

SEQ ID NO: 3388 - protein, 49 aa, synthetic construct
  REGION 1..49: note = TNR1B Linker (6-54)
TRSMAPGAVHLPQPVSTRSQHTQPTPEPSTAPSTSFLLPMGPSPPAEGS

SEQ ID NO: 3389 - protein, 48 aa, synthetic construct
  REGION 1..48: note = TNR1B Linker (7-54)
RSMAPGAVHLPQPVSTRSQHTQPTPEPSTAPSTSFLLPMGPSPPAEGS

SEQ ID NO: 3390 - protein, 47 aa, synthetic construct
  REGION 1..47: note = TNR1B Linker (8-54)
SMAPGAVHLPQPVSTRSQHTQPTPEPSTAPSTSFLLPMGPSPPAEGS

SEQ ID NO: 3391 - protein, 46 aa, synthetic construct
  REGION 1..46: note = TNR1B Linker (9-54)
MAPGAVHLPQPVSTRSQHTQPTPEPSTAPSTSFLLPMGPSPPAEGS

SEQ ID NO: 3392 - protein, 45 aa, synthetic construct
  REGION 1..45: note = TNR1B Linker (10-54)
APGAVHLPQPVSTRSQHTQPTPEPSTAPSTSFLLPMGPSPPAEGS

SEQ ID NO: 3393 - protein, 44 aa, synthetic construct
  REGION 1..44: note = TNR1B Linker (11-54)
PGAVHLPQPVSTRSQHTQPTPEPSTAPSTSFLLPMGPSPPAEGS

SEQ ID NO: 3394 - protein, 43 aa, synthetic construct
  REGION 1..43: note = TNR1B Linker (12-54)
GAVHLPQPVSTRSQHTQPTPEPSTAPSTSFLLPMGPSPPAEGS

SEQ ID NO: 3395 - protein, 42 aa, synthetic construct
  REGION 1..42: note = TNR1B Linker (13-54)
AVHLPQPVSTRSQHTQPTPEPSTAPSTSFLLPMGPSPPAEGS

SEQ ID NO: 3396 - protein, 41 aa, synthetic construct
  REGION 1..41: note = TNR1B Linker (14-54)
VHLPQPVSTRSQHTQPTPEPSTAPSTSFLLPMGPSPPAEGS

SEQ ID NO: 3397 - protein, 40 aa, synthetic construct
  REGION 1..40: note = TNR1B Linker (15-54)
HLPQPVSTRSQHTQPTPEPSTAPSTSFLLPMGPSPPAEGS

SEQ ID NO: 3398 - protein, 39 aa, synthetic construct
  REGION 1..39: note = TNR1B Linker (16-54)
LPQPVSTRSQHTQPTPEPSTAPSTSFLLPMGPSPPAEGS

SEQ ID NO: 3399 - protein, 38 aa, synthetic construct
  REGION 1..38: note = TNR1B Linker (17-54)
PQPVSTRSQHTQPTPEPSTAPSTSFLLPMGPSPPAEGS

SEQ ID NO: 3400 - protein, 37 aa, synthetic construct
  REGION 1..37: note = TNR1B Linker (18-54)
QPVSTRSQHTQPTPEPSTAPSTSFLLPMGPSPPAEGS

SEQ ID NO: 3401 - protein, 36 aa, synthetic construct
  REGION 1..36: note = TNR1B Linker (19-54)
PVSTRSQHTQPTPEPSTAPSTSFLLPMGPSPPAEGS

SEQ ID NO: 3402 - protein, 35 aa, synthetic construct
  REGION 1..35: note = TNR1B Linker (20-54)
VSTRSQHTQPTPEPSTAPSTSFLLPMGPSPPAEGS

SEQ ID NO: 3403 - protein, 34 aa, synthetic construct
  REGION 1..34: note = TNR1B Linker (21-54)
STRSQHTQPTPEPSTAPSTSFLLPMGPSPPAEGS

SEQ ID NO: 3404 - protein, 33 aa, synthetic construct
  REGION 1..33: note = TNR1B Linker (22-54)
TRSQHTQPTPEPSTAPSTSFLLPMGPSPPAEGS

SEQ ID NO: 3405 - protein, 32 aa, synthetic construct
  REGION 1..32: note = TNR1B Linker (23-54)
RSQHTQPTPEPSTAPSTSFLLPMGPSPPAEGS

SEQ ID NO: 3406 - protein, 31 aa, synthetic construct
  REGION 1..31: note = TNR1B Linker (24-54)
SQHTQPTPEPSTAPSTSFLLPMGPSPPAEGS

SEQ ID NO: 3407 - protein, 30 aa, synthetic construct
  REGION 1..30: note = TNR1B Linker (25-54)
QHTQPTPEPSTAPSTSFLLPMGPSPPAEGS

SEQ ID NO: 3408 - protein, 29 aa, synthetic construct
  REGION 1..29: note = TNR1B Linker (26-54)
HTQPTPEPSTAPSTSFLLPMGPSPPAEGS

SEQ ID NO: 3409 - protein, 28 aa, synthetic construct
  REGION 1..28: note = TNR1B Linker (27-54)
TQPTPEPSTAPSTSFLLPMGPSPPAEGS

SEQ ID NO: 3410 - protein, 27 aa, synthetic construct
  REGION 1..27: note = TNR1B Linker (28-54)
QPTPEPSTAPSTSFLLPMGPSPPAEGS

SEQ ID NO: 3411 - protein, 26 aa, synthetic construct
  REGION 1..26: note = TNR1B Linker (29-54)
PTPEPSTAPSTSFLLPMGPSPPAEGS

SEQ ID NO: 3412 - protein, 25 aa, synthetic construct
  REGION 1..25: note = TNR1B Linker (30-54)
TPEPSTAPSTSFLLPMGPSPPAEGS

SEQ ID NO: 3413 - protein, 24 aa, synthetic construct
  REGION 1..24: note = TNR1B Linker (31-54)
PEPSTAPSTSFLLPMGPSPPAEGS

SEQ ID NO: 3414 - protein, 23 aa, synthetic construct
  REGION 1..23: note = TNR1B Linker (32-54)
EPSTAPSTSFLLPMGPSPPAEGS

SEQ ID NO: 3415 - protein, 22 aa, synthetic construct
  REGION 1..22: note = TNR1B Linker (33-54)
PSTAPSTSFLLPMGPSPPAEGS

SEQ ID NO: 3416 - protein, 21 aa, synthetic construct
  REGION 1..21: note = TNR1B Linker (34-54)
STAPSTSFLLPMGPSPPAEGS

SEQ ID NO: 3417 - protein, 20 aa, synthetic construct
  REGION 1..20: note = TNR1B Linker (35-54)
TAPSTSFLLPMGPSPPAEGS

SEQ ID NO: 3418 - protein, 19 aa, synthetic construct
  REGION 1..19: note = TNR1B Linker (36-54)
APSTSFLLPMGPSPPAEGS

SEQ ID NO: 3419 - protein, 18 aa, synthetic construct
  REGION 1..18: note = TNR1B Linker (37-54)
PSTSFLLPMGPSPPAEGS

SEQ ID NO: 3420 - protein, 17 aa, synthetic construct
  REGION 1..17: note = TNR1B Linker (38-54)
STSFLLPMGPSPPAEGS

SEQ ID NO: 3421 - protein, 16 aa, synthetic construct
  REGION 1..16: note = TNR1B Linker (39-54)
TSFLLPMGPSPPAEGS

SEQ ID NO: 3422 - protein, 15 aa, synthetic construct
  REGION 1..15: note = TNR1B Linker (40-54)
SFLLPMGPSPPAEGS

SEQ ID NO: 3423 - protein, 14 aa, synthetic construct
  REGION 1..14: note = TNR1B Linker (41-54)
FLLPMGPSPPAEGS

SEQ ID NO: 3424 - protein, 13 aa, synthetic construct
  REGION 1..13: note = TNR1B Linker (42-54)
LLPMGPSPPAEGS

SEQ ID NO: 3425 - protein, 12 aa, synthetic construct
  REGION 1..12: note = TNR1B Linker (43-54)
LPMGPSPPAEGS

SEQ ID NO: 3426 - protein, 11 aa, synthetic construct
  REGION 1..11: note = TNR1B Linker (44-54)
PMGPSPPAEGS

SEQ ID NO: 3427 - protein, 10 aa, synthetic construct
  REGION 1..10: note = TNR1B Linker (45-54)
MGPSPPAEGS

SEQ ID NO: 3428 - protein, 9 aa, synthetic construct
  REGION 1..9: note = TNR1B Linker (46-54)
GPSPPAEGS

SEQ ID NO: 3429 - protein, 8 aa, synthetic construct
  REGION 1..8: note = TNR1B Linker (47-54)
PSPPAEGS

SEQ ID NO: 3430 - protein, 7 aa, synthetic construct
  REGION 1..7: note = TNR1B Linker (48-54)
SPPAEGS

SEQ ID NO: 3431 - protein, 6 aa, synthetic construct
  REGION 1..6: note = TNR1B Linker (49-54)
PPAEGS

SEQ ID NO: 3432 - protein, 5 aa, synthetic construct
  REGION 1..5: note = TNR1B Linker (50-54)
PAEGS

SEQ ID NO: 3433 - protein, 53 aa, synthetic construct
  REGION 1..53: note = TNR1B Linker (1-53)
TSTSPTRSMAPGAVHLPQPVSTRSQHTQPTPEPSTAPSTSFLLPMGPSPPAEG

SEQ ID NO: 3434 - protein, 52 aa, synthetic construct
  REGION 1..52: note = TNR1B Linker (2-53)
STSPTRSMAPGAVHLPQPVSTRSQHTQPTPEPSTAPSTSFLLPMGPSPPAEG

SEQ ID NO: 3435 - protein, 51 aa, synthetic construct
  REGION 1..51: note = TNR1B Linker (3-53)
TSPTRSMAPGAVHLPQPVSTRSQHTQPTPEPSTAPSTSFLLPMGPSPPAEG

SEQ ID NO: 3436 - protein, 50 aa, synthetic construct
  REGION 1..50: note = TNR1B Linker (4-53)
SPTRSMAPGAVHLPQPVSTRSQHTQPTPEPSTAPSTSFLLPMGPSPPAEG

SEQ ID NO: 3437 - protein, 49 aa, synthetic construct
  REGION 1..49: note = TNR1B Linker (5-53)
PTRSMAPGAVHLPQPVSTRSQHTQPTPEPSTAPSTSFLLPMGPSPPAEG

SEQ ID NO: 3438 - protein, 48 aa, synthetic construct
  REGION 1..48: note = TNR1B Linker (6-53)
TRSMAPGAVHLPQPVSTRSQHTQPTPEPSTAPSTSFLLPMGPSPPAEG

SEQ ID NO: 3439 - protein, 47 aa, synthetic construct
  REGION 1..47: note = TNR1B Linker (7-53)
RSMAPGAVHLPQPVSTRSQHTQPTPEPSTAPSTSFLLPMGPSPPAEG

SEQ ID NO: 3440 - protein, 46 aa, synthetic construct
  REGION 1..46: note = TNR1B Linker (8-53)
SMAPGAVHLPQPVSTRSQHTQPTPEPSTAPSTSFLLPMGPSPPAEG

SEQ ID NO: 3441 - protein, 45 aa, synthetic construct
  REGION 1..45: note = TNR1B Linker (9-53)
MAPGAVHLPQPVSTRSQHTQPTPEPSTAPSTSFLLPMGPSPPAEG

SEQ ID NO: 3442 - protein, 44 aa, synthetic construct
  REGION 1..44: note = TNR1B Linker (10-53)
APGAVHLPQPVSTRSQHTQPTPEPSTAPSTSFLLPMGPSPPAEG

SEQ ID NO: 3443 - protein, 43 aa, synthetic construct
  REGION 1..43: note = TNR1B Linker (11-53)
PGAVHLPQPVSTRSQHTQPTPEPSTAPSTSFLLPMGPSPPAEG

SEQ ID NO: 3444 - protein, 42 aa, synthetic construct
  REGION 1..42: note = TNR1B Linker (12-53)
GAVHLPQPVSTRSQHTQPTPEPSTAPSTSFLLPMGPSPPAEG

SEQ ID NO: 3445 - protein, 41 aa, synthetic construct
  REGION 1..41: note = TNR1B Linker (13-53)
AVHLPQPVSTRSQHTQPTPEPSTAPSTSFLLPMGPSPPAEG

SEQ ID NO: 3446 - protein, 40 aa, synthetic construct
  REGION 1..40: note = TNR1B Linker (14-53)
VHLPQPVSTRSQHTQPTPEPSTAPSTSFLLPMGPSPPAEG

SEQ ID NO: 3447 - protein, 39 aa, synthetic construct
  REGION 1..39: note = TNR1B Linker (15-53)
HLPQPVSTRSQHTQPTPEPSTAPSTSFLLPMGPSPPAEG

SEQ ID NO: 3448 - protein, 38 aa, synthetic construct
  REGION 1..38: note = TNR1B Linker (16-53)
LPQPVSTRSQHTQPTPEPSTAPSTSFLLPMGPSPPAEG

SEQ ID NO: 3449 - protein, 37 aa, synthetic construct
  REGION 1..37: note = TNR1B Linker (17-53)
PQPVSTRSQHTQPTPEPSTAPSTSFLLPMGPSPPAEG

SEQ ID NO: 3450 - protein, 36 aa, synthetic construct
  REGION 1..36: note = TNR1B Linker (18-53)
QPVSTRSQHTQPTPEPSTAPSTSFLLPMGPSPPAEG

SEQ ID NO: 3451 - protein, 35 aa, synthetic construct
  REGION 1..35: note = TNR1B Linker (19-53)
PVSTRSQHTQPTPEPSTAPSTSFLLPMGPSPPAEG

SEQ ID NO: 3452 - protein, 34 aa, synthetic construct
  REGION 1..34: note = TNR1B Linker (20-53)
VSTRSQHTQPTPEPSTAPSTSFLLPMGPSPPAEG

SEQ ID NO: 3453 - protein, 33 aa, synthetic construct
  REGION 1..33: note = TNR1B Linker (21-53)
STRSQHTQPTPEPSTAPSTSFLLPMGPSPPAEG

SEQ ID NO: 3454 - protein, 32 aa, synthetic construct
  REGION 1..32: note = TNR1B Linker (22-53)
TRSQHTQPTPEPSTAPSTSFLLPMGPSPPAEG

SEQ ID NO: 3455 - protein, 31 aa, synthetic construct
  REGION 1..31: note = TNR1B Linker (23-53)
RSQHTQPTPEPSTAPSTSFLLPMGPSPPAEG

SEQ ID NO: 3456 - protein, 30 aa, synthetic construct
  REGION 1..30: note = TNR1B Linker (24-53)
SQHTQPTPEPSTAPSTSFLLPMGPSPPAEG

SEQ ID NO: 3457 - protein, 29 aa, synthetic construct
  REGION 1..29: note = TNR1B Linker (25-53)
QHTQPTPEPSTAPSTSFLLPMGPSPPAEG

SEQ ID NO: 3458 - protein, 28 aa, synthetic construct
  REGION 1..28: note = TNR1B Linker (26-53)
HTQPTPEPSTAPSTSFLLPMGPSPPAEG

SEQ ID NO: 3459 - protein, 27 aa, synthetic construct
  REGION 1..27: note = TNR1B Linker (27-53)
TQPTPEPSTAPSTSFLLPMGPSPPAEG

SEQ ID NO: 3460 - protein, 26 aa, synthetic construct
  REGION 1..26: note = TNR1B Linker (28-53)
QPTPEPSTAPSTSFLLPMGPSPPAEG

SEQ ID NO: 3461 - protein, 25 aa, synthetic construct
  REGION 1..25: note = TNR1B Linker (29-53)
PTPEPSTAPSTSFLLPMGPSPPAEG

SEQ ID NO: 3462 - protein, 24 aa, synthetic construct
  REGION 1..24: note = TNR1B Linker (30-53)
TPEPSTAPSTSFLLPMGPSPPAEG

SEQ ID NO: 3463 - protein, 23 aa, synthetic construct
  REGION 1..23: note = TNR1B Linker (31-53)
PEPSTAPSTSFLLPMGPSPPAEG

SEQ ID NO: 3464 - protein, 22 aa, synthetic construct
  REGION 1..22: note = TNR1B Linker (32-53)
EPSTAPSTSFLLPMGPSPPAEG

SEQ ID NO: 3465 - protein, 21 aa, synthetic construct
  REGION 1..21: note = TNR1B Linker (33-53)
PSTAPSTSFLLPMGPSPPAEG

SEQ ID NO: 3466 - protein, 20 aa, synthetic construct
  REGION 1..20: note = TNR1B Linker (34-53)
STAPSTSFLLPMGPSPPAEG

SEQ ID NO: 3467 - protein, 19 aa, synthetic construct
  REGION 1..19: note = TNR1B Linker (35-53)
TAPSTSFLLPMGPSPPAEG

SEQ ID NO: 3468 - protein, 18 aa, synthetic construct
  REGION 1..18: note = TNR1B Linker (36-53)
APSTSFLLPMGPSPPAEG

SEQ ID NO: 3469 - protein, 17 aa, synthetic construct
  REGION 1..17: note = TNR1B Linker (37-53)
PSTSFLLPMGPSPPAEG

SEQ ID NO: 3470 - protein, 16 aa, synthetic construct
  REGION 1..16: note = TNR1B Linker (38-53)
STSFLLPMGPSPPAEG

SEQ ID NO: 3471 - protein, 15 aa, synthetic construct
  REGION 1..15: note = TNR1B Linker (39-53)
TSFLLPMGPSPPAEG

SEQ ID NO: 3472 - protein, 14 aa, synthetic construct
  REGION 1..14: note = TNR1B Linker (40-53)
SFLLPMGPSPPAEG

SEQ ID NO: 3473 - protein, 13 aa, synthetic construct
  REGION 1..13: note = TNR1B Linker (41-53)
FLLPMGPSPPAEG

SEQ ID NO: 3474 - protein, 12 aa, synthetic construct
  REGION 1..12: note = TNR1B Linker (42-53)
LLPMGPSPPAEG

SEQ ID NO: 3475 - protein, 11 aa, synthetic construct
  REGION 1..11: note = TNR1B Linker (43-53)
LPMGPSPPAEG

SEQ ID NO: 3476 - protein, 10 aa, synthetic construct
  REGION 1..10: note = TNR1B Linker (44-53)
PMGPSPPAEG

SEQ ID NO: 3477 - protein, 9 aa, synthetic construct
  REGION 1..9: note = TNR1B Linker (45-53)
MGPSPPAEG

SEQ ID NO: 3478 - protein, 8 aa, synthetic construct
  REGION 1..8: note = TNR1B Linker (46-53)
GPSPPAEG

SEQ ID NO: 3479 - protein, 7 aa, synthetic construct
  REGION 1..7: note = TNR1B Linker (47-53)
PSPPAEG

SEQ ID NO: 3480 - protein, 6 aa, synthetic construct
  REGION 1..6: note = TNR1B Linker (48-53)
SPPAEG

SEQ ID NO: 3481 - protein, 5 aa, synthetic construct
  REGION 1..5: note = TNR1B Linker (49-53)
PPAEG

SEQ ID NO: 3482 - protein, 52 aa, synthetic construct
  REGION 1..52: note = TNR1B Linker (1-52)
TSTSPTRSMAPGAVHLPQPVSTRSQHTQPTPEPSTAPSTSFLLPMGPSPPAE

SEQ ID NO: 3483 - protein, 51 aa, synthetic construct
  REGION 1..51: note = TNR1B Linker (2-52)
STSPTRSMAPGAVHLPQPVSTRSQHTQPTPEPSTAPSTSFLLPMGPSPPAE

SEQ ID NO: 3484 - protein, 50 aa, synthetic construct
  REGION 1..50: note = TNR1B Linker (3-52)
TSPTRSMAPGAVHLPQPVSTRSQHTQPTPEPSTAPSTSFLLPMGPSPPAE

SEQ ID NO: 3485 - protein, 49 aa, synthetic construct
  REGION 1..49: note = TNR1B Linker (4-52)
SPTRSMAPGAVHLPQPVSTRSQHTQPTPEPSTAPSTSFLLPMGPSPPAE

SEQ ID NO: 3486 - protein, 48 aa, synthetic construct
  REGION 1..48: note = TNR1B Linker (5-52)
PTRSMAPGAVHLPQPVSTRSQHTQPTPEPSTAPSTSFLLPMGPSPPAE

SEQ ID NO: 3487 - protein, 47 aa, synthetic construct
  REGION 1..47: note = TNR1B Linker (6-52)
TRSMAPGAVHLPQPVSTRSQHTQPTPEPSTAPSTSFLLPMGPSPPAE

SEQ ID NO: 3488 - protein, 46 aa, synthetic construct
  REGION 1..46: note = TNR1B Linker (7-52)
RSMAPGAVHLPQPVSTRSQHTQPTPEPSTAPSTSFLLPMGPSPPAE

SEQ ID NO: 3489 - protein, 45 aa, synthetic construct
  REGION 1..45: note = TNR1B Linker (8-52)
SMAPGAVHLPQPVSTRSQHTQPTPEPSTAPSTSFLLPMGPSPPAE

SEQ ID NO: 3490 - protein, 44 aa, synthetic construct
  REGION 1..44: note = TNR1B Linker (9-52)
MAPGAVHLPQPVSTRSQHTQPTPEPSTAPSTSFLLPMGPSPPAE

SEQ ID NO: 3491 - protein, 43 aa, synthetic construct
  REGION 1..43: note = TNR1B Linker (10-52)
APGAVHLPQPVSTRSQHTQPTPEPSTAPSTSFLLPMGPSPPAE

SEQ ID NO: 3492 - protein, 42 aa, synthetic construct
  REGION 1..42: note = TNR1B Linker (11-52)
PGAVHLPQPVSTRSQHTQPTPEPSTAPSTSFLLPMGPSPPAE

SEQ ID NO: 3493 - protein, 41 aa, synthetic construct
  REGION 1..41: note = TNR1B Linker (12-52)
GAVHLPQPVSTRSQHTQPTPEPSTAPSTSFLLPMGPSPPAE

SEQ ID NO: 3494 - protein, 40 aa, synthetic construct
  REGION 1..40: note = TNR1B Linker (13-52)
AVHLPQPVSTRSQHTQPTPEPSTAPSTSFLLPMGPSPPAE

SEQ ID NO: 3495 - protein, 39 aa, synthetic construct
  REGION 1..39: note = TNR1B Linker (14-52)
VHLPQPVSTRSQHTQPTPEPSTAPSTSFLLPMGPSPPAE

SEQ ID NO: 3496 - protein, 38 aa, synthetic construct
  REGION 1..38: note = TNR1B Linker (15-52)
HLPQPVSTRSQHTQPTPEPSTAPSTSFLLPMGPSPPAE

SEQ ID NO: 3497 - protein, 37 aa, synthetic construct
  REGION 1..37: note = TNR1B Linker (16-52)
LPQPVSTRSQHTQPTPEPSTAPSTSFLLPMGPSPPAE

SEQ ID NO: 3498 - protein, 36 aa, synthetic construct
  REGION 1..36: note = TNR1B Linker (17-52)
PQPVSTRSQHTQPTPEPSTAPSTSFLLPMGPSPPAE

SEQ ID NO: 3499 - protein, 35 aa, synthetic construct
  REGION 1..35: note = TNR1B Linker (18-52)
QPVSTRSQHTQPTPEPSTAPSTSFLLPMGPSPPAE

SEQ ID NO: 3500 - protein, 34 aa, synthetic construct
  REGION 1..34: note = TNR1B Linker (19-52)
PVSTRSQHTQPTPEPSTAPSTSFLLPMGPSPPAE

SEQ ID NO: 3501 - protein, 33 aa, synthetic construct
  REGION 1..33: note = TNR1B Linker (20-52)
VSTRSQHTQPTPEPSTAPSTSFLLPMGPSPPAE

SEQ ID NO: 3502 - protein, 32 aa, synthetic construct
  REGION 1..32: note = TNR1B Linker (21-52)
STRSQHTQPTPEPSTAPSTSFLLPMGPSPPAE

SEQ ID NO: 3503 - protein, 31 aa, synthetic construct
  REGION 1..31: note = TNR1B Linker (22-52)
TRSQHTQPTPEPSTAPSTSFLLPMGPSPPAE

SEQ ID NO: 3504 - protein, 30 aa, synthetic construct
  REGION 1..30: note = TNR1B Linker (23-52)
RSQHTQPTPEPSTAPSTSFLLPMGPSPPAE

SEQ ID NO: 3505 - protein, 29 aa, synthetic construct
  REGION 1..29: note = TNR1B Linker (24-52)
SQHTQPTPEPSTAPSTSFLLPMGPSPPAE

SEQ ID NO: 3506 - protein, 28 aa, synthetic construct
  REGION 1..28: note = TNR1B Linker (25-52)
QHTQPTPEPSTAPSTSFLLPMGPSPPAE

SEQ ID NO: 3507 - protein, 27 aa, synthetic construct
  REGION 1..27: note = TNR1B Linker (26-52)
HTQPTPEPSTAPSTSFLLPMGPSPPAE

SEQ ID NO: 3508 - protein, 26 aa, synthetic construct
  REGION 1..26: note = TNR1B Linker (27-52)
TQPTPEPSTAPSTSFLLPMGPSPPAE

SEQ ID NO: 3509 - protein, 25 aa, synthetic construct
  REGION 1..25: note = TNR1B Linker (28-52)
QPTPEPSTAPSTSFLLPMGPSPPAE

SEQ ID NO: 3510 - protein, 24 aa, synthetic construct
  REGION 1..24: note = TNR1B Linker (29-52)
PTPEPSTAPSTSFLLPMGPSPPAE

SEQ ID NO: 3511 - protein, 23 aa, synthetic construct
  REGION 1..23: note = TNR1B Linker (30-52)
TPEPSTAPSTSFLLPMGPSPPAE

SEQ ID NO: 3512 - protein, 22 aa, synthetic construct
  REGION 1..22: note = TNR1B Linker (31-52)
PEPSTAPSTSFLLPMGPSPPAE

SEQ ID NO: 3513 - protein, 21 aa, synthetic construct
  REGION 1..21: note = TNR1B Linker (32-52)
EPSTAPSTSFLLPMGPSPPAE

SEQ ID NO: 3514 - protein, 20 aa, synthetic construct
  REGION 1..20: note = TNR1B Linker (33-52)
PSTAPSTSFLLPMGPSPPAE

SEQ ID NO: 3515 - protein, 19 aa, synthetic construct
  REGION 1..19: note = TNR1B Linker (34-52)
STAPSTSFLLPMGPSPPAE

SEQ ID NO: 3516 - protein, 18 aa, synthetic construct
  REGION 1..18: note = TNR1B Linker (35-52)
TAPSTSFLLPMGPSPPAE

SEQ ID NO: 3517 - protein, 17 aa, synthetic construct
  REGION 1..17: note = TNR1B Linker (36-52)
APSTSFLLPMGPSPPAE

SEQ ID NO: 3518 - protein, 16 aa, synthetic construct
  REGION 1..16: note = TNR1B Linker (37-52)
PSTSFLLPMGPSPPAE

SEQ ID NO: 3519 - protein, 15 aa, synthetic construct
  REGION 1..15: note = TNR1B Linker (38-52)
STSFLLPMGPSPPAE

SEQ ID NO: 3520 - protein, 14 aa, synthetic construct
  REGION 1..14: note = TNR1B Linker (39-52)
TSFLLPMGPSPPAE

SEQ ID NO: 3521 - protein, 13 aa, synthetic construct
  REGION 1..13: note = TNR1B Linker (40-52)
SFLLPMGPSPPAE

SEQ ID NO: 3522 - protein, 12 aa, synthetic construct
  REGION 1..12: note = TNR1B Linker (41-52)
FLLPMGPSPPAE

SEQ ID NO: 3523 - protein, 11 aa, synthetic construct
  REGION 1..11: note = TNR1B Linker (42-52)
LLPMGPSPPAE

SEQ ID NO: 3524 - protein, 10 aa, synthetic construct
  REGION 1..10: note = TNR1B Linker (43-52)
LPMGPSPPAE

SEQ ID NO: 3525 - protein, 9 aa, synthetic construct
  REGION 1..9: note = TNR1B Linker (44-52)
PMGPSPPAE

SEQ ID NO: 3526 - protein, 8 aa, synthetic construct
  REGION 1..8: note = TNR1B Linker (45-52)
MGPSPPAE

SEQ ID NO: 3527 - protein, 7 aa, synthetic construct
  REGION 1..7: note = TNR1B Linker (46-52)
GPSPPAE

SEQ ID NO: 3528 - protein, 6 aa, synthetic construct
  REGION 1..6: note = TNR1B Linker (47-52)
PSPPAE

SEQ ID NO: 3529 - protein, 5 aa, synthetic construct
  REGION 1..5: note = TNR1B Linker (48-52)
SPPAE

SEQ ID NO: 3530 - protein, 51 aa, synthetic construct
  REGION 1..51: note = TNR1B Linker (1-51)
TSTSPTRSMAPGAVHLPQPVSTRSQHTQPTPEPSTAPSTSFLLPMGPSPPA

SEQ ID NO: 3531 - protein, 50 aa, synthetic construct
  REGION 1..50: note = TNR1B Linker (2-51)
STSPTRSMAPGAVHLPQPVSTRSQHTQPTPEPSTAPSTSFLLPMGPSPPA

SEQ ID NO: 3532 - protein, 49 aa, synthetic construct
  REGION 1..49: note = TNR1B Linker (3-51)
TSPTRSMAPGAVHLPQPVSTRSQHTQPTPEPSTAPSTSFLLPMGPSPPA

SEQ ID NO: 3533 - protein, 48 aa, synthetic construct
  REGION 1..48: note = TNR1B Linker (4-51)
SPTRSMAPGAVHLPQPVSTRSQHTQPTPEPSTAPSTSFLLPMGPSPPA

SEQ ID NO: 3534 - protein, 47 aa, synthetic construct
  REGION 1..47: note = TNR1B Linker (5-51)
PTRSMAPGAVHLPQPVSTRSQHTQPTPEPSTAPSTSFLLPMGPSPPA

SEQ ID NO: 3535 - protein, 46 aa, synthetic construct
  REGION 1..46: note = TNR1B Linker (6-51)
TRSMAPGAVHLPQPVSTRSQHTQPTPEPSTAPSTSFLLPMGPSPPA

SEQ ID NO: 3536 - protein, 45 aa, synthetic construct
  REGION 1..45: note = TNR1B Linker (7-51)
RSMAPGAVHLPQPVSTRSQHTQPTPEPSTAPSTSFLLPMGPSPPA

SEQ ID NO: 3537 - protein, 44 aa, synthetic construct
  REGION 1..44: note = TNR1B Linker (8-51)
SMAPGAVHLPQPVSTRSQHTQPTPEPSTAPSTSFLLPMGPSPPA

SEQ ID NO: 3538 - protein, 43 aa, synthetic construct
  REGION 1..43: note = TNR1B Linker (9-51)
MAPGAVHLPQPVSTRSQHTQPTPEPSTAPSTSFLLPMGPSPPA

SEQ ID NO: 3539 - protein, 42 aa, synthetic construct
  REGION 1..42: note = TNR1B Linker (10-51)
APGAVHLPQPVSTRSQHTQPTPEPSTAPSTSFLLPMGPSPPA

SEQ ID NO: 3540 - protein, 41 aa, synthetic construct
  REGION 1..41: note = TNR1B Linker (11-51)
PGAVHLPQPVSTRSQHTQPTPEPSTAPSTSFLLPMGPSPPA

SEQ ID NO: 3541 - protein, 40 aa, synthetic construct
  REGION 1..40: note = TNR1B Linker (12-51)
GAVHLPQPVSTRSQHTQPTPEPSTAPSTSFLLPMGPSPPA

SEQ ID NO: 3542 - protein, 39 aa, synthetic construct
  REGION 1..39: note = TNR1B Linker (13-51)
AVHLPQPVSTRSQHTQPTPEPSTAPSTSFLLPMGPSPPA

SEQ ID NO: 3543 - protein, 38 aa, synthetic construct
  REGION 1..38: note = TNR1B Linker (14-51)
VHLPQPVSTRSQHTQPTPEPSTAPSTSFLLPMGPSPPA

SEQ ID NO: 3544 - protein, 37 aa, synthetic construct
  REGION 1..37: note = TNR1B Linker (15-51)
HLPQPVSTRSQHTQPTPEPSTAPSTSFLLPMGPSPPA

SEQ ID NO: 3545 - protein, 36 aa, synthetic construct
  REGION 1..36: note = TNR1B Linker (16-51)
LPQPVSTRSQHTQPTPEPSTAPSTSFLLPMGPSPPA

SEQ ID NO: 3546 - protein, 35 aa, synthetic construct
  REGION 1..35: note = TNR1B Linker (17-51)
PQPVSTRSQHTQPTPEPSTAPSTSFLLPMGPSPPA

SEQ ID NO: 3547 - protein, 34 aa, synthetic construct
  REGION 1..34: note = TNR1B Linker (18-51)
QPVSTRSQHTQPTPEPSTAPSTSFLLPMGPSPPA

SEQ ID NO: 3548 - protein, 33 aa, synthetic construct
  REGION 1..33: note = TNR1B Linker (19-51)
PVSTRSQHTQPTPEPSTAPSTSFLLPMGPSPPA

SEQ ID NO: 3549 - protein, 32 aa, synthetic construct
  REGION 1..32: note = TNR1B Linker (20-51)
VSTRSQHTQPTPEPSTAPSTSFLLPMGPSPPA

SEQ ID NO: 3550 - protein, 31 aa, synthetic construct
  REGION 1..31: note = TNR1B Linker (21-51)
STRSQHTQPTPEPSTAPSTSFLLPMGPSPPA

SEQ ID NO: 3551 - protein, 30 aa, synthetic construct
  REGION 1..30: note = TNR1B Linker (22-51)
TRSQHTQPTPEPSTAPSTSFLLPMGPSPPA

SEQ ID NO: 3552 - protein, 29 aa, synthetic construct
  REGION 1..29: note = TNR1B Linker (23-51)
RSQHTQPTPEPSTAPSTSFLLPMGPSPPA

SEQ ID NO: 3553 - protein, 28 aa, synthetic construct
  REGION 1..28: note = TNR1B Linker (24-51)
SQHTQPTPEPSTAPSTSFLLPMGPSPPA

SEQ ID NO: 3554 - protein, 27 aa, synthetic construct
  REGION 1..27: note = TNR1B Linker (25-51)
QHTQPTPEPSTAPSTSFLLPMGPSPPA

SEQ ID NO: 3555 - protein, 26 aa, synthetic construct
  REGION 1..26: note = TNR1B Linker (26-51)
HTQPTPEPSTAPSTSFLLPMGPSPPA

SEQ ID NO: 3556 - protein, 25 aa, synthetic construct
  REGION 1..25: note = TNR1B Linker (27-51)
TQPTPEPSTAPSTSFLLPMGPSPPA

SEQ ID NO: 3557 - protein, 24 aa, synthetic construct
  REGION 1..24: note = TNR1B Linker (28-51)
QPTPEPSTAPSTSFLLPMGPSPPA

SEQ ID NO: 3558 - protein, 23 aa, synthetic construct
  REGION 1..23: note = TNR1B Linker (29-51)
PTPEPSTAPSTSFLLPMGPSPPA

SEQ ID NO: 3559 - protein, 22 aa, synthetic construct
  REGION 1..22: note = TNR1B Linker (30-51)
TPEPSTAPSTSFLLPMGPSPPA

SEQ ID NO: 3560 - protein, 21 aa, synthetic construct
  REGION 1..21: note = TNR1B Linker (31-51)
PEPSTAPSTSFLLPMGPSPPA

SEQ ID NO: 3561 - protein, 20 aa, synthetic construct
  REGION 1..20: note = TNR1B Linker (32-51)
EPSTAPSTSFLLPMGPSPPA

SEQ ID NO: 3562 - protein, 19 aa, synthetic construct
  REGION 1..19: note = TNR1B Linker (33-51)
PSTAPSTSFLLPMGPSPPA

SEQ ID NO: 3563 - protein, 18 aa, synthetic construct
  REGION 1..18: note = TNR1B Linker (34-51)
STAPSTSFLLPMGPSPPA

SEQ ID NO: 3564 - protein, 17 aa, synthetic construct
  REGION 1..17: note = TNR1B Linker (35-51)
TAPSTSFLLPMGPSPPA

SEQ ID NO: 3565 - protein, 16 aa, synthetic construct
  REGION 1..16: note = TNR1B Linker (36-51)
APSTSFLLPMGPSPPA

SEQ ID NO: 3566 - protein, 15 aa, synthetic construct
  REGION 1..15: note = TNR1B Linker (37-51)
PSTSFLLPMGPSPPA

SEQ ID NO: 3567 - protein, 14 aa, synthetic construct
  REGION 1..14: note = TNR1B Linker (38-51)
STSFLLPMGPSPPA

SEQ ID NO: 3568 - protein, 13 aa, synthetic construct
  REGION 1..13: note = TNR1B Linker (39-51)
TSFLLPMGPSPPA

SEQ ID NO: 3569 - protein, 12 aa, synthetic construct
  REGION 1..12: note = TNR1B Linker (40-51)
SFLLPMGPSPPA

SEQ ID NO: 3570 - protein, 11 aa, synthetic construct
  REGION 1..11: note = TNR1B Linker (41-51)
FLLPMGPSPPA

SEQ ID NO: 3571 - protein, 10 aa, synthetic construct
  REGION 1..10: note = TNR1B Linker (42-51)
LLPMGPSPPA

SEQ ID NO: 3572 - protein, 9 aa, synthetic construct
  REGION 1..9: note = TNR1B Linker (43-51)
LPMGPSPPA

SEQ ID NO: 3573 - protein, 8 aa, synthetic construct
  REGION 1..8: note = TNR1B Linker (44-51)
PMGPSPPA

SEQ ID NO: 3574 - protein, 7 aa, synthetic construct
  REGION 1..7: note = TNR1B Linker (45-51)
MGPSPPA

SEQ ID NO: 3575 - protein, 6 aa, synthetic construct
  REGION 1..6: note = TNR1B Linker (46-51)
GPSPPA

SEQ ID NO: 3576 - protein, 5 aa, synthetic construct
  REGION 1..5: note = TNR1B Linker (47-51)
PSPPA

SEQ ID NO: 3577 - protein, 50 aa, synthetic construct
  REGION 1..50: note = TNR1B Linker (1-50)
TSTSPTRSMAPGAVHLPQPVSTRSQHTQPTPEPSTAPSTSFLLPMGPSPP

SEQ ID NO: 3578 - protein, 49 aa, synthetic construct
  REGION 1..49: note = TNR1B Linker (2-50)
STSPTRSMAPGAVHLPQPVSTRSQHTQPTPEPSTAPSTSFLLPMGPSPP

SEQ ID NO: 3579 - protein, 48 aa, synthetic construct
  REGION 1..48: note = TNR1B Linker (3-50)
TSPTRSMAPGAVHLPQPVSTRSQHTQPTPEPSTAPSTSFLLPMGPSPP

SEQ ID NO: 3580 - protein, 47 aa, synthetic construct
  REGION 1..47: note = TNR1B Linker (4-50)
SPTRSMAPGAVHLPQPVSTRSQHTQPTPEPSTAPSTSFLLPMGPSPP

SEQ ID NO: 3581 - protein, 46 aa, synthetic construct
  REGION 1..46: note = TNR1B Linker (5-50)
PTRSMAPGAVHLPQPVSTRSQHTQPTPEPSTAPSTSFLLPMGPSPP

SEQ ID NO: 3582 - protein, 45 aa, synthetic construct
  REGION 1..45: note = TNR1B Linker (6-50)
TRSMAPGAVHLPQPVSTRSQHTQPTPEPSTAPSTSFLLPMGPSPP

SEQ ID NO: 3583 - protein, 44 aa, synthetic construct
  REGION 1..44: note = TNR1B Linker (7-50)
RSMAPGAVHLPQPVSTRSQHTQPTPEPSTAPSTSFLLPMGPSPP

SEQ ID NO: 3584 - protein, 43 aa, synthetic construct
  REGION 1..43: note = TNR1B Linker (8-50)
SMAPGAVHLPQPVSTRSQHTQPTPEPSTAPSTSFLLPMGPSPP

SEQ ID NO: 3585 - protein, 42 aa, synthetic construct
  REGION 1..42: note = TNR1B Linker (9-50)
MAPGAVHLPQPVSTRSQHTQPTPEPSTAPSTSFLLPMGPSPP

SEQ ID NO: 3586 - protein, 41 aa, synthetic construct
  REGION 1..41: note = TNR1B Linker (10-50)
APGAVHLPQPVSTRSQHTQPTPEPSTAPSTSFLLPMGPSPP

SEQ ID NO: 3587 - protein, 40 aa, synthetic construct
  REGION 1..40: note = TNR1B Linker (11-50)
PGAVHLPQPVSTRSQHTQPTPEPSTAPSTSFLLPMGPSPP

SEQ ID NO: 3588 - protein, 39 aa, synthetic construct
  REGION 1..39: note = TNR1B Linker (12-50)
GAVHLPQPVSTRSQHTQPTPEPSTAPSTSFLLPMGPSPP

SEQ ID NO: 3589 - protein, 38 aa, synthetic construct
  REGION 1..38: note = TNR1B Linker (13-50)
AVHLPQPVSTRSQHTQPTPEPSTAPSTSFLLPMGPSPP

SEQ ID NO: 3590 - protein, 37 aa, synthetic construct
  REGION 1..37: note = TNR1B Linker (14-50)
VHLPQPVSTRSQHTQPTPEPSTAPSTSFLLPMGPSPP

SEQ ID NO: 3591 - protein, 36 aa, synthetic construct
  REGION 1..36: note = TNR1B Linker (15-50)
HLPQPVSTRSQHTQPTPEPSTAPSTSFLLPMGPSPP

SEQ ID NO: 3592 - protein, 35 aa, synthetic construct
  REGION 1..35: note = TNR1B Linker (16-50)
LPQPVSTRSQHTQPTPEPSTAPSTSFLLPMGPSPP

SEQ ID NO: 3593 - protein, 34 aa, synthetic construct
  REGION 1..34: note = TNR1B Linker (17-50)
PQPVSTRSQHTQPTPEPSTAPSTSFLLPMGPSPP

SEQ ID NO: 3594 - protein, 33 aa, synthetic construct
  REGION 1..33: note = TNR1B Linker (18-50)
QPVSTRSQHTQPTPEPSTAPSTSFLLPMGPSPP

SEQ ID NO: 3595 - protein, 32 aa, synthetic construct
  REGION 1..32: note = TNR1B Linker (19-50)
PVSTRSQHTQPTPEPSTAPSTSFLLPMGPSPP

SEQ ID NO: 3596 - protein, 31 aa, synthetic construct
  REGION 1..31: note = TNR1B Linker (20-50)
VSTRSQHTQPTPEPSTAPSTSFLLPMGPSPP

SEQ ID NO: 3597 - protein, 30 aa, synthetic construct
  REGION 1..30: note = TNR1B Linker (21-50)
STRSQHTQPTPEPSTAPSTSFLLPMGPSPP

SEQ ID NO: 3598 - protein, 29 aa, synthetic construct
  REGION 1..29: note = TNR1B Linker (22-50)
TRSQHTQPTPEPSTAPSTSFLLPMGPSPP

SEQ ID NO: 3599 - protein, 28 aa, synthetic construct
  REGION 1..28: note = TNR1B Linker (23-50)
RSQHTQPTPEPSTAPSTSFLLPMGPSPP

SEQ ID NO: 3600 - protein, 27 aa, synthetic construct
  REGION 1..27: note = TNR1B Linker (24-50)
SQHTQPTPEPSTAPSTSFLLPMGPSPP

SEQ ID NO: 3601 - protein, 26 aa, synthetic construct
  REGION 1..26: note = TNR1B Linker (25-50)
QHTQPTPEPSTAPSTSFLLPMGPSPP

SEQ ID NO: 3602 - protein, 25 aa, synthetic construct
  REGION 1..25: note = TNR1B Linker (26-50)
HTQPTPEPSTAPSTSFLLPMGPSPP

SEQ ID NO: 3603 - protein, 24 aa, synthetic construct
  REGION 1..24: note = TNR1B Linker (27-50)
TQPTPEPSTAPSTSFLLPMGPSPP

SEQ ID NO: 3604 - protein, 23 aa, synthetic construct
  REGION 1..23: note = TNR1B Linker (28-50)
QPTPEPSTAPSTSFLLPMGPSPP

SEQ ID NO: 3605 - protein, 22 aa, synthetic construct
  REGION 1..22: note = TNR1B Linker (29-50)
PTPEPSTAPSTSFLLPMGPSPP

SEQ ID NO: 3606 - protein, 21 aa, synthetic construct
  REGION 1..21: note = TNR1B Linker (30-50)
TPEPSTAPSTSFLLPMGPSPP

SEQ ID NO: 3607 - protein, 20 aa, synthetic construct
  REGION 1..20: note = TNR1B Linker (31-50)
PEPSTAPSTSFLLPMGPSPP

SEQ ID NO: 3608 - protein, 19 aa, synthetic construct
  REGION 1..19: note = TNR1B Linker (32-50)
EPSTAPSTSFLLPMGPSPP

SEQ ID NO: 3609 - protein, 18 aa, synthetic construct
  REGION 1..18: note = TNR1B Linker (33-50)
PSTAPSTSFLLPMGPSPP

SEQ ID NO: 3610 - protein, 17 aa, synthetic construct
  REGION 1..17: note = TNR1B Linker (34-50)
STAPSTSFLLPMGPSPP

SEQ ID NO: 3611 - protein, 16 aa, synthetic construct
  REGION 1..16: note = TNR1B Linker (35-50)
TAPSTSFLLPMGPSPP

SEQ ID NO: 3612 - protein, 15 aa, synthetic construct
  REGION 1..15: note = TNR1B Linker (36-50)
APSTSFLLPMGPSPP

SEQ ID NO: 3613 - protein, 14 aa, synthetic construct
  REGION 1..14: note = TNR1B Linker (37-50)
PSTSFLLPMGPSPP

SEQ ID NO: 3614 - protein, 13 aa, synthetic construct
  REGION 1..13: note = TNR1B Linker (38-50)
STSFLLPMGPSPP

SEQ ID NO: 3615 - protein, 12 aa, synthetic construct
  REGION 1..12: note = TNR1B Linker (39-50)
TSFLLPMGPSPP

SEQ ID NO: 3616 - protein, 11 aa, synthetic construct
  REGION 1..11: note = TNR1B Linker (40-50)
SFLLPMGPSPP

SEQ ID NO: 3617 - protein, 10 aa, synthetic construct
  REGION 1..10: note = TNR1B Linker (41-50)
FLLPMGPSPP

SEQ ID NO: 3618 - protein, 9 aa, synthetic construct
  REGION 1..9: note = TNR1B Linker (42-50)
LLPMGPSPP

SEQ ID NO: 3619 - protein, 8 aa, synthetic construct
  REGION 1..8: note = TNR1B Linker (43-50)
LPMGPSPP

SEQ ID NO: 3620 - protein, 7 aa, synthetic construct
  REGION 1..7: note = TNR1B Linker (44-50)
PMGPSPP

SEQ ID NO: 3621 - protein, 6 aa, synthetic construct
  REGION 1..6: note = TNR1B Linker (45-50)
MGPSPP

SEQ ID NO: 3622 - protein, 5 aa, synthetic construct
  REGION 1..5: note = TNR1B Linker (46-50)
GPSPP

SEQ ID NO: 3623 - protein, 49 aa, synthetic construct
  REGION 1..49: note = TNR1B Linker (1-49)
TSTSPTRSMAPGAVHLPQPVSTRSQHTQPTPEPSTAPSTSFLLPMGPSP

SEQ ID NO: 3624 - protein, 48 aa, synthetic construct
  REGION 1..48: note = TNR1B Linker (2-49)
STSPTRSMAPGAVHLPQPVSTRSQHTQPTPEPSTAPSTSFLLPMGPSP

SEQ ID NO: 3625 - protein, 47 aa, synthetic construct
  REGION 1..47: note = TNR1B Linker (3-49)
TSPTRSMAPGAVHLPQPVSTRSQHTQPTPEPSTAPSTSFLLPMGPSP

SEQ ID NO: 3626 - protein, 46 aa, synthetic construct
  REGION 1..46: note = TNR1B Linker (4-49)
SPTRSMAPGAVHLPQPVSTRSQHTQPTPEPSTAPSTSFLLPMGPSP

SEQ ID NO: 3627 - protein, 45 aa, synthetic construct
  REGION 1..45: note = TNR1B Linker (5-49)
PTRSMAPGAVHLPQPVSTRSQHTQPTPEPSTAPSTSFLLPMGPSP

SEQ ID NO: 3628 - protein, 44 aa, synthetic construct
  REGION 1..44: note = TNR1B Linker (6-49)
TRSMAPGAVHLPQPVSTRSQHTQPTPEPSTAPSTSFLLPMGPSP

SEQ ID NO: 3629 - protein, 43 aa, synthetic construct
  REGION 1..43: note = TNR1B Linker (7-49)
RSMAPGAVHLPQPVSTRSQHTQPTPEPSTAPSTSFLLPMGPSP

SEQ ID NO: 3630 - protein, 42 aa, synthetic construct
  REGION 1..42: note = TNR1B Linker (8-49)
SMAPGAVHLPQPVSTRSQHTQPTPEPSTAPSTSFLLPMGPSP

SEQ ID NO: 3631 - protein, 41 aa, synthetic construct
  REGION 1..41: note = TNR1B Linker (9-49)
MAPGAVHLPQPVSTRSQHTQPTPEPSTAPSTSFLLPMGPSP

SEQ ID NO: 3632 - protein, 40 aa, synthetic construct
  REGION 1..40: note = TNR1B Linker (10-49)
APGAVHLPQPVSTRSQHTQPTPEPSTAPSTSFLLPMGPSP

SEQ ID NO: 3633 - protein, 39 aa, synthetic construct
  REGION 1..39: note = TNR1B Linker (11-49)
PGAVHLPQPVSTRSQHTQPTPEPSTAPSTSFLLPMGPSP

SEQ ID NO: 3634 - protein, 38 aa, synthetic construct
  REGION 1..38: note = TNR1B Linker (12-49)
GAVHLPQPVSTRSQHTQPTPEPSTAPSTSFLLPMGPSP

SEQ ID NO: 3635 - protein, 37 aa, synthetic construct
  REGION 1..37: note = TNR1B Linker (13-49)
AVHLPQPVSTRSQHTQPTPEPSTAPSTSFLLPMGPSP

SEQ ID NO: 3636 - protein, 36 aa, synthetic construct
  REGION 1..36: note = TNR1B Linker (14-49)
VHLPQPVSTRSQHTQPTPEPSTAPSTSFLLPMGPSP

SEQ ID NO: 3637 - protein, 35 aa, synthetic construct
  REGION 1..35: note = TNR1B Linker (15-49)
HLPQPVSTRSQHTQPTPEPSTAPSTSFLLPMGPSP

SEQ ID NO: 3638 - protein, 34 aa, synthetic construct
  REGION 1..34: note = TNR1B Linker (16-49)
LPQPVSTRSQHTQPTPEPSTAPSTSFLLPMGPSP

SEQ ID NO: 3639 - protein, 33 aa, synthetic construct
  REGION 1..33: note = TNR1B Linker (17-49)
PQPVSTRSQHTQPTPEPSTAPSTSFLLPMGPSP

SEQ ID NO: 3640 - protein, 32 aa, synthetic construct
  REGION 1..32: note = TNR1B Linker (18-49)
QPVSTRSQHTQPTPEPSTAPSTSFLLPMGPSP

SEQ ID NO: 3641 - protein, 31 aa, synthetic construct
  REGION 1..31: note = TNR1B Linker (19-49)
PVSTRSQHTQPTPEPSTAPSTSFLLPMGPSP

SEQ ID NO: 3642 - protein, 30 aa, synthetic construct
  REGION 1..30: note = TNR1B Linker (20-49)
VSTRSQHTQPTPEPSTAPSTSFLLPMGPSP

SEQ ID NO: 3643 - protein, 29 aa, synthetic construct
  REGION 1..29: note = TNR1B Linker (21-49)
STRSQHTQPTPEPSTAPSTSFLLPMGPSP

SEQ ID NO: 3644 - protein, 28 aa, synthetic construct
  REGION 1..28: note = TNR1B Linker (22-49)
TRSQHTQPTPEPSTAPSTSFLLPMGPSP

SEQ ID NO: 3645 - protein, 27 aa, synthetic construct
  REGION 1..27: note = TNR1B Linker (23-49)
RSQHTQPTPEPSTAPSTSFLLPMGPSP

SEQ ID NO: 3646 - protein, 26 aa, synthetic construct
  REGION 1..26: note = TNR1B Linker (24-49)
SQHTQPTPEPSTAPSTSFLLPMGPSP

SEQ ID NO: 3647 - protein, 25 aa, synthetic construct
  REGION 1..25: note = TNR1B Linker (25-49)
QHTQPTPEPSTAPSTSFLLPMGPSP

SEQ ID NO: 3648 - protein, 24 aa, synthetic construct
  REGION 1..24: note = TNR1B Linker (26-49)
HTQPTPEPSTAPSTSFLLPMGPSP

SEQ ID NO: 3649 - protein, 23 aa, synthetic construct
  REGION 1..23: note = TNR1B Linker (27-49)
TQPTPEPSTAPSTSFLLPMGPSP

SEQ ID NO: 3650 - protein, 22 aa, synthetic construct
  REGION 1..22: note = TNR1B Linker (28-49)
QPTPEPSTAPSTSFLLPMGPSP

SEQ ID NO: 3651 - protein, 21 aa, synthetic construct
  REGION 1..21: note = TNR1B Linker (29-49)
PTPEPSTAPSTSFLLPMGPSP

SEQ ID NO: 3652 - protein, 20 aa, synthetic construct
  REGION 1..20: note = TNR1B Linker (30-49)
TPEPSTAPSTSFLLPMGPSP

SEQ ID NO: 3653 - protein, 19 aa, synthetic construct
  REGION 1..19: note = TNR1B Linker (31-49)
PEPSTAPSTSFLLPMGPSP

SEQ ID NO: 3654 - protein, 18 aa, synthetic construct
  REGION 1..18: note = TNR1B Linker (32-49)
EPSTAPSTSFLLPMGPSP

SEQ ID NO: 3655 - protein, 17 aa, synthetic construct
  REGION 1..17: note = TNR1B Linker (33-49)
PSTAPSTSFLLPMGPSP

SEQ ID NO: 3656 - protein, 16 aa, synthetic construct
  REGION 1..16: note = TNR1B Linker (34-49)
STAPSTSFLLPMGPSP

SEQ ID NO: 3657 - protein, 15 aa, synthetic construct
  REGION 1..15: note = TNR1B Linker (35-49)
TAPSTSFLLPMGPSP

SEQ ID NO: 3658 - protein, 14 aa, synthetic construct
  REGION 1..14: note = TNR1B Linker (36-49)
APSTSFLLPMGPSP

SEQ ID NO: 3659 - protein, 13 aa, synthetic construct
  REGION 1..13: note = TNR1B Linker (37-49)
PSTSFLLPMGPSP

SEQ ID NO: 3660 - protein, 12 aa, synthetic construct
  REGION 1..12: note = TNR1B Linker (38-49)
STSFLLPMGPSP

SEQ ID NO: 3661 - protein, 11 aa, synthetic construct
  REGION 1..11: note = TNR1B Linker (39-49)
TSFLLPMGPSP

SEQ ID NO: 3662 - protein, 10 aa, synthetic construct
  REGION 1..10: note = TNR1B Linker (40-49)
SFLLPMGPSP

SEQ ID NO: 3663 - protein, 9 aa, synthetic construct
  REGION 1..9: note = TNR1B Linker (41-49)
FLLPMGPSP

SEQ ID NO: 3664 - protein, 8 aa, synthetic construct
  REGION 1..8: note = TNR1B Linker (42-49)
LLPMGPSP

SEQ ID NO: 3665 - protein, 7 aa, synthetic construct
  REGION 1..7: note = TNR1B Linker (43-49)
LPMGPSP

SEQ ID NO: 3666 - protein, 6 aa, synthetic construct
  REGION 1..6: note = TNR1B Linker (44-49)
PMGPSP

SEQ ID NO: 3667 - protein, 5 aa, synthetic construct
  REGION 1..5: note = TNR1B Linker (45-49)
MGPSP

SEQ ID NO: 3668 - protein, 48 aa, synthetic construct
  REGION 1..48: note = TNR1B Linker (1-48)
TSTSPTRSMAPGAVHLPQPVSTRSQHTQPTPEPSTAPSTSFLLPMGPS

SEQ ID NO: 3669 - protein, 47 aa, synthetic construct
  REGION 1..47: note = TNR1B Linker (2-48)
STSPTRSMAPGAVHLPQPVSTRSQHTQPTPEPSTAPSTSFLLPMGPS

SEQ ID NO: 3670 - protein, 46 aa, synthetic construct
  REGION 1..46: note = TNR1B Linker (3-48)
TSPTRSMAPGAVHLPQPVSTRSQHTQPTPEPSTAPSTSFLLPMGPS

SEQ ID NO: 3671 - protein, 45 aa, synthetic construct
  REGION 1..45: note = TNR1B Linker (4-48)
SPTRSMAPGAVHLPQPVSTRSQHTQPTPEPSTAPSTSFLLPMGPS

SEQ ID NO: 3672 - protein, 44 aa, synthetic construct
  REGION 1..44: note = TNR1B Linker (5-48)
PTRSMAPGAVHLPQPVSTRSQHTQPTPEPSTAPSTSFLLPMGPS

SEQ ID NO: 3673 - protein, 43 aa, synthetic construct
  REGION 1..43: note = TNR1B Linker (6-48)
TRSMAPGAVHLPQPVSTRSQHTQPTPEPSTAPSTSFLLPMGPS

SEQ ID NO: 3674 - protein, 42 aa, synthetic construct
  REGION 1..42: note = TNR1B Linker (7-48)
RSMAPGAVHLPQPVSTRSQHTQPTPEPSTAPSTSFLLPMGPS

SEQ ID NO: 3675 - protein, 41 aa, synthetic construct
  REGION 1..41: note = TNR1B Linker (8-48)
SMAPGAVHLPQPVSTRSQHTQPTPEPSTAPSTSFLLPMGPS

SEQ ID NO: 3676 - protein, 40 aa, synthetic construct
  REGION 1..40: note = TNR1B Linker (9-48)
MAPGAVHLPQPVSTRSQHTQPTPEPSTAPSTSFLLPMGPS

SEQ ID NO: 3677 - protein, 39 aa, synthetic construct
  REGION 1..39: note = TNR1B Linker (10-48)
APGAVHLPQPVSTRSQHTQPTPEPSTAPSTSFLLPMGPS

SEQ ID NO: 3678 - protein, 38 aa, synthetic construct
  REGION 1..38: note = TNR1B Linker (11-48)
PGAVHLPQPVSTRSQHTQPTPEPSTAPSTSFLLPMGPS

SEQ ID NO: 3679 - protein, 37 aa, synthetic construct
  REGION 1..37: note = TNR1B Linker (12-48)
GAVHLPQPVSTRSQHTQPTPEPSTAPSTSFLLPMGPS

SEQ ID NO: 3680 - protein, 36 aa, synthetic construct
  REGION 1..36: note = TNR1B Linker (13-48)
AVHLPQPVSTRSQHTQPTPEPSTAPSTSFLLPMGPS

SEQ ID NO: 3681 - protein, 35 aa, synthetic construct
  REGION 1..35: note = TNR1B Linker (14-48)
VHLPQPVSTRSQHTQPTPEPSTAPSTSFLLPMGPS

SEQ ID NO: 3682 - protein, 34 aa, synthetic construct
  REGION 1..34: note = TNR1B Linker (15-48)
HLPQPVSTRSQHTQPTPEPSTAPSTSFLLPMGPS

SEQ ID NO: 3683 - protein, 33 aa, synthetic construct
  REGION 1..33: note = TNR1B Linker (16-48)
LPQPVSTRSQHTQPTPEPSTAPSTSFLLPMGPS

SEQ ID NO: 3684 - protein, 32 aa, synthetic construct
  REGION 1..32: note = TNR1B Linker (17-48)
PQPVSTRSQHTQPTPEPSTAPSTSFLLPMGPS

SEQ ID NO: 3685 - protein, 31 aa, synthetic construct
  REGION 1..31: note = TNR1B Linker (18-48)
QPVSTRSQHTQPTPEPSTAPSTSFLLPMGPS

SEQ ID NO: 3686 - protein, 30 aa, synthetic construct
  REGION 1..30: note = TNR1B Linker (19-48)
PVSTRSQHTQPTPEPSTAPSTSFLLPMGPS

SEQ ID NO: 3687 - protein, 29 aa, synthetic construct
  REGION 1..29: note = TNR1B Linker (20-48)
VSTRSQHTQPTPEPSTAPSTSFLLPMGPS

SEQ ID NO: 3688 - protein, 28 aa, synthetic construct
  REGION 1..28: note = TNR1B Linker (21-48)
STRSQHTQPTPEPSTAPSTSFLLPMGPS

SEQ ID NO: 3689 - protein, 27 aa, synthetic construct
  REGION 1..27: note = TNR1B Linker (22-48)
TRSQHTQPTPEPSTAPSTSFLLPMGPS

SEQ ID NO: 3690 - protein, 26 aa, synthetic construct
  REGION 1..26: note = TNR1B Linker (23-48)
RSQHTQPTPEPSTAPSTSFLLPMGPS

SEQ ID NO: 3691 - protein, 25 aa, synthetic construct
  REGION 1..25: note = TNR1B Linker (24-48)
SQHTQPTPEPSTAPSTSFLLPMGPS

SEQ ID NO: 3692 - protein, 24 aa, synthetic construct
  REGION 1..24: note = TNR1B Linker (25-48)
QHTQPTPEPSTAPSTSFLLPMGPS

SEQ ID NO: 3693 - protein, 23 aa, synthetic construct
  REGION 1..23: note = TNR1B Linker (26-48)
HTQPTPEPSTAPSTSFLLPMGPS

SEQ ID NO: 3694 - protein, 22 aa, synthetic construct
  REGION 1..22: note = TNR1B Linker (27-48)
TQPTPEPSTAPSTSFLLPMGPS

SEQ ID NO: 3695 - protein, 21 aa, synthetic construct
  REGION 1..21: note = TNR1B Linker (28-48)
QPTPEPSTAPSTSFLLPMGPS

SEQ ID NO: 3696 - protein, 20 aa, synthetic construct
  REGION 1..20: note = TNR1B Linker (29-48)
PTPEPSTAPSTSFLLPMGPS

SEQ ID NO: 3697 - protein, 19 aa, synthetic construct
  REGION 1..19: note = TNR1B Linker (30-48)
TPEPSTAPSTSFLLPMGPS

SEQ ID NO: 3698 - protein, 18 aa, synthetic construct
  REGION 1..18: note = TNR1B Linker (31-48)
PEPSTAPSTSFLLPMGPS

SEQ ID NO: 3699 - protein, 17 aa, synthetic construct
  REGION 1..17: note = TNR1B Linker (32-48)
EPSTAPSTSFLLPMGPS

SEQ ID NO: 3700 - protein, 16 aa, synthetic construct
  REGION 1..16: note = TNR1B Linker (33-48)
PSTAPSTSFLLPMGPS

SEQ ID NO: 3701 - protein, 15 aa, synthetic construct
  REGION 1..15: note = TNR1B Linker (34-48)
STAPSTSFLLPMGPS

SEQ ID NO: 3702 - protein, 14 aa, synthetic construct
  REGION 1..14: note = TNR1B Linker (35-48)
TAPSTSFLLPMGPS

SEQ ID NO: 3703 - protein, 13 aa, synthetic construct
  REGION 1..13: note = TNR1B Linker (36-48)
APSTSFLLPMGPS

SEQ ID NO: 3704 - protein, 12 aa, synthetic construct
  REGION 1..12: note = TNR1B Linker (37-48)
PSTSFLLPMGPS

SEQ ID NO: 3705 - protein, 11 aa, synthetic construct
  REGION 1..11: note = TNR1B Linker (38-48)
STSFLLPMGPS

SEQ ID NO: 3706 - protein, 10 aa, synthetic construct
  REGION 1..10: note = TNR1B Linker (39-48)
TSFLLPMGPS

SEQ ID NO: 3707 - protein, 9 aa, synthetic construct
  REGION 1..9: note = TNR1B Linker (40-48)
SFLLPMGPS

SEQ ID NO: 3708 - protein, 8 aa, synthetic construct
  REGION 1..8: note = TNR1B Linker (41-48)
FLLPMGPS

SEQ ID NO: 3709 - protein, 7 aa, synthetic construct
  REGION 1..7: note = TNR1B Linker (42-48)
LLPMGPS

SEQ ID NO: 3710 - protein, 6 aa, synthetic construct
  REGION 1..6: note = TNR1B Linker (43-48)
LPMGPS

SEQ ID NO: 3711 - protein, 5 aa, synthetic construct
  REGION 1..5: note = TNR1B Linker (44-48)
PMGPS

SEQ ID NO: 3712 - protein, 47 aa, synthetic construct
  REGION 1..47: note = TNR1B Linker (1-47)
TSTSPTRSMAPGAVHLPQPVSTRSQHTQPTPEPSTAPSTSFLLPMGP

SEQ ID NO: 3713 - protein, 46 aa, synthetic construct
  REGION 1..46: note = TNR1B Linker (2-47)
STSPTRSMAPGAVHLPQPVSTRSQHTQPTPEPSTAPSTSFLLPMGP

SEQ ID NO: 3714 - protein, 45 aa, synthetic construct
  REGION 1..45: note = TNR1B Linker (3-47)
TSPTRSMAPGAVHLPQPVSTRSQHTQPTPEPSTAPSTSFLLPMGP

SEQ ID NO: 3715 - protein, 44 aa, synthetic construct
  REGION 1..44: note = TNR1B Linker (4-47)
SPTRSMAPGAVHLPQPVSTRSQHTQPTPEPSTAPSTSFLLPMGP

SEQ ID NO: 3716 - protein, 43 aa, synthetic construct
  REGION 1..43: note = TNR1B Linker (5-47)
PTRSMAPGAVHLPQPVSTRSQHTQPTPEPSTAPSTSFLLPMGP

SEQ ID NO: 3717 - protein, 42 aa, synthetic construct
  REGION 1..42: note = TNR1B Linker (6-47)
TRSMAPGAVHLPQPVSTRSQHTQPTPEPSTAPSTSFLLPMGP

SEQ ID NO: 3718 - protein, 41 aa, synthetic construct
  REGION 1..41: note = TNR1B Linker (7-47)
RSMAPGAVHLPQPVSTRSQHTQPTPEPSTAPSTSFLLPMGP

SEQ ID NO: 3719 - protein, 40 aa, synthetic construct
  REGION 1..40: note = TNR1B Linker (8-47)
SMAPGAVHLPQPVSTRSQHTQPTPEPSTAPSTSFLLPMGP

SEQ ID NO: 3720 - protein, 39 aa, synthetic construct
  REGION 1..39: note = TNR1B Linker (9-47)
MAPGAVHLPQPVSTRSQHTQPTPEPSTAPSTSFLLPMGP

SEQ ID NO: 3721 - protein, 38 aa, synthetic construct
  REGION 1..38: note = TNR1B Linker (10-47)
APGAVHLPQPVSTRSQHTQPTPEPSTAPSTSFLLPMGP

SEQ ID NO: 3722 - protein, 37 aa, synthetic construct
  REGION 1..37: note = TNR1B Linker (11-47)
PGAVHLPQPVSTRSQHTQPTPEPSTAPSTSFLLPMGP

SEQ ID NO: 3723 - protein, 36 aa, synthetic construct
  REGION 1..36: note = TNR1B Linker (12-47)
GAVHLPQPVSTRSQHTQPTPEPSTAPSTSFLLPMGP

SEQ ID NO: 3724 - protein, 35 aa, synthetic construct
  REGION 1..35: note = TNR1B Linker (13-47)
AVHLPQPVSTRSQHTQPTPEPSTAPSTSFLLPMGP

SEQ ID NO: 3725 - protein, 34 aa, synthetic construct
  REGION 1..34: note = TNR1B Linker (14-47)
VHLPQPVSTRSQHTQPTPEPSTAPSTSFLLPMGP

SEQ ID NO: 3726 - protein, 33 aa, synthetic construct
  REGION 1..33: note = TNR1B Linker (15-47)
HLPQPVSTRSQHTQPTPEPSTAPSTSFLLPMGP

SEQ ID NO: 3727 - protein, 32 aa, synthetic construct
  REGION 1..32: note = TNR1B Linker (16-47)
LPQPVSTRSQHTQPTPEPSTAPSTSFLLPMGP

SEQ ID NO: 3728 - protein, 31 aa, synthetic construct
  REGION 1..31: note = TNR1B Linker (17-47)
PQPVSTRSQHTQPTPEPSTAPSTSFLLPMGP

SEQ ID NO: 3729 - protein, 30 aa, synthetic construct
  REGION 1..30: note = TNR1B Linker (18-47)
QPVSTRSQHTQPTPEPSTAPSTSFLLPMGP

SEQ ID NO: 3730 - protein, 29 aa, synthetic construct
  REGION 1..29: note = TNR1B Linker (19-47)
PVSTRSQHTQPTPEPSTAPSTSFLLPMGP

SEQ ID NO: 3731 - protein, 28 aa, synthetic construct
  REGION 1..28: note = TNR1B Linker (20-47)
VSTRSQHTQPTPEPSTAPSTSFLLPMGP

SEQ ID NO: 3732 - protein, 27 aa, synthetic construct
  REGION 1..27: note = TNR1B Linker (21-47)
STRSQHTQPTPEPSTAPSTSFLLPMGP

SEQ ID NO: 3733 - protein, 26 aa, synthetic construct
  REGION 1..26: note = TNR1B Linker (22-47)
TRSQHTQPTPEPSTAPSTSFLLPMGP

SEQ ID NO: 3734 - protein, 25 aa, synthetic construct
  REGION 1..25: note = TNR1B Linker (23-47)
RSQHTQPTPEPSTAPSTSFLLPMGP

SEQ ID NO: 3735 - protein, 24 aa, synthetic construct
  REGION 1..24: note = TNR1B Linker (24-47)
SQHTQPTPEPSTAPSTSFLLPMGP

SEQ ID NO: 3736 - protein, 23 aa, synthetic construct
  REGION 1..23: note = TNR1B Linker (25-47)
QHTQPTPEPSTAPSTSFLLPMGP

SEQ ID NO: 3737 - protein, 22 aa, synthetic construct
  REGION 1..22: note = TNR1B Linker (26-47)
HTQPTPEPSTAPSTSFLLPMGP

SEQ ID NO: 3738 - protein, 21 aa, synthetic construct
  REGION 1..21: note = TNR1B Linker (27-47)
TQPTPEPSTAPSTSFLLPMGP

SEQ ID NO: 3739 - protein, 20 aa, synthetic construct
  REGION 1..20: note = TNR1B Linker (28-47)
QPTPEPSTAPSTSFLLPMGP

SEQ ID NO: 3740 - protein, 19 aa, synthetic construct
  REGION 1..19: note = TNR1B Linker (29-47)
PTPEPSTAPSTSFLLPMGP

SEQ ID NO: 3741 - protein, 18 aa, synthetic construct
  REGION 1..18: note = TNR1B Linker (30-47)
TPEPSTAPSTSFLLPMGP

SEQ ID NO: 3742 - protein, 17 aa, synthetic construct
  REGION 1..17: note = TNR1B Linker (31-47)
PEPSTAPSTSFLLPMGP

SEQ ID NO: 3743 - protein, 16 aa, synthetic construct
  REGION 1..16: note = TNR1B Linker (32-47)
EPSTAPSTSFLLPMGP

SEQ ID NO: 3744 - protein, 15 aa, synthetic construct
  REGION 1..15: note = TNR1B Linker (33-47)
PSTAPSTSFLLPMGP

SEQ ID NO: 3745 - protein, 14 aa, synthetic construct
  REGION 1..14: note = TNR1B Linker (34-47)
STAPSTSFLLPMGP

SEQ ID NO: 3746 - protein, 13 aa, synthetic construct
  REGION 1..13: note = TNR1B Linker (35-47)
TAPSTSFLLPMGP

SEQ ID NO: 3747 - protein, 12 aa, synthetic construct
  REGION 1..12: note = TNR1B Linker (36-47)
APSTSFLLPMGP

SEQ ID NO: 3748 - protein, 11 aa, synthetic construct
  REGION 1..11: note = TNR1B Linker (37-47)
PSTSFLLPMGP

SEQ ID NO: 3749 - protein, 10 aa, synthetic construct
  REGION 1..10: note = TNR1B Linker (38-47)
STSFLLPMGP

SEQ ID NO: 3750 - protein, 9 aa, synthetic construct
  REGION 1..9: note = TNR1B Linker (39-47)
TSFLLPMGP

SEQ ID NO: 3751 - protein, 8 aa, synthetic construct
  REGION 1..8: note = TNR1B Linker (40-47)
SFLLPMGP

SEQ ID NO: 3752 - protein, 7 aa, synthetic construct
  REGION 1..7: note = TNR1B Linker (41-47)
FLLPMGP

SEQ ID NO: 3753 - protein, 6 aa, synthetic construct
  REGION 1..6: note = TNR1B Linker (42-47)
LLPMGP

SEQ ID NO: 3754 - protein, 5 aa, synthetic construct
  REGION 1..5: note = TNR1B Linker (43-47)
LPMGP

SEQ ID NO: 3755 - protein, 46 aa, synthetic construct
  REGION 1..46: note = TNR1B Linker (1-46)
TSTSPTRSMAPGAVHLPQPVSTRSQHTQPTPEPSTAPSTSFLLPMG

SEQ ID NO: 3756 - protein, 45 aa, synthetic construct
  REGION 1..45: note = TNR1B Linker (2-46)
STSPTRSMAPGAVHLPQPVSTRSQHTQPTPEPSTAPSTSFLLPMG

SEQ ID NO: 3757 - protein, 44 aa, synthetic construct
  REGION 1..44: note = TNR1B Linker (3-46)
TSPTRSMAPGAVHLPQPVSTRSQHTQPTPEPSTAPSTSFLLPMG

SEQ ID NO: 3758 - protein, 43 aa, synthetic construct
  REGION 1..43: note = TNR1B Linker (4-46)
SPTRSMAPGAVHLPQPVSTRSQHTQPTPEPSTAPSTSFLLPMG

SEQ ID NO: 3759 - protein, 42 aa, synthetic construct
  REGION 1..42: note = TNR1B Linker (5-46)
PTRSMAPGAVHLPQPVSTRSQHTQPTPEPSTAPSTSFLLPMG

SEQ ID NO: 3760 - protein, 41 aa, synthetic construct
  REGION 1..41: note = TNR1B Linker (6-46)
TRSMAPGAVHLPQPVSTRSQHTQPTPEPSTAPSTSFLLPMG

SEQ ID NO: 3761 - protein, 40 aa, synthetic construct
  REGION 1..40: note = TNR1B Linker (7-46)
RSMAPGAVHLPQPVSTRSQHTQPTPEPSTAPSTSFLLPMG

SEQ ID NO: 3762 - protein, 39 aa, synthetic construct
  REGION 1..39: note = TNR1B Linker (8-46)
SMAPGAVHLPQPVSTRSQHTQPTPEPSTAPSTSFLLPMG

SEQ ID NO: 3763 - protein, 38 aa, synthetic construct
  REGION 1..38: note = TNR1B Linker (9-46)
MAPGAVHLPQPVSTRSQHTQPTPEPSTAPSTSFLLPMG

SEQ ID NO: 3764 - protein, 37 aa, synthetic construct
  REGION 1..37: note = TNR1B Linker (10-46)
APGAVHLPQPVSTRSQHTQPTPEPSTAPSTSFLLPMG

SEQ ID NO: 3765 - protein, 36 aa, synthetic construct
  REGION 1..36: note = TNR1B Linker (11-46)
PGAVHLPQPVSTRSQHTQPTPEPSTAPSTSFLLPMG

SEQ ID NO: 3766 - protein, 35 aa, synthetic construct
  REGION 1..35: note = TNR1B Linker (12-46)
GAVHLPQPVSTRSQHTQPTPEPSTAPSTSFLLPMG

SEQ ID NO: 3767 - protein, 34 aa, synthetic construct
  REGION 1..34: note = TNR1B Linker (13-46)
AVHLPQPVSTRSQHTQPTPEPSTAPSTSFLLPMG

SEQ ID NO: 3768 - protein, 33 aa, synthetic construct
  REGION 1..33: note = TNR1B Linker (14-46)
VHLPQPVSTRSQHTQPTPEPSTAPSTSFLLPMG

SEQ ID NO: 3769 - protein, 32 aa, synthetic construct
  REGION 1..32: note = TNR1B Linker (15-46)
HLPQPVSTRSQHTQPTPEPSTAPSTSFLLPMG

SEQ ID NO: 3770 - protein, 31 aa, synthetic construct
  REGION 1..31: note = TNR1B Linker (16-46)
LPQPVSTRSQHTQPTPEPSTAPSTSFLLPMG

SEQ ID NO: 3771 - protein, 30 aa, synthetic construct
  REGION 1..30: note = TNR1B Linker (17-46)
PQPVSTRSQHTQPTPEPSTAPSTSFLLPMG

SEQ ID NO: 3772 - protein, 29 aa, synthetic construct
  REGION 1..29: note = TNR1B Linker (18-46)
QPVSTRSQHTQPTPEPSTAPSTSFLLPMG

SEQ ID NO: 3773 - protein, 28 aa, synthetic construct
  REGION 1..28: note = TNR1B Linker (19-46)
PVSTRSQHTQPTPEPSTAPSTSFLLPMG

SEQ ID NO: 3774 - protein, 27 aa, synthetic construct
  REGION 1..27: note = TNR1B Linker (20-46)
VSTRSQHTQPTPEPSTAPSTSFLLPMG

SEQ ID NO: 3775 - protein, 26 aa, synthetic construct
  REGION 1..26: note = TNR1B Linker (21-46)
STRSQHTQPTPEPSTAPSTSFLLPMG

SEQ ID NO: 3776 - protein, 25 aa, synthetic construct
  REGION 1..25: note = TNR1B Linker (22-46)
TRSQHTQPTPEPSTAPSTSFLLPMG

SEQ ID NO: 3777 - protein, 24 aa, synthetic construct
  REGION 1..24: note = TNR1B Linker (23-46)
RSQHTQPTPEPSTAPSTSFLLPMG

SEQ ID NO: 3778 - protein, 23 aa, synthetic construct
  REGION 1..23: note = TNR1B Linker (24-46)
SQHTQPTPEPSTAPSTSFLLPMG

SEQ ID NO: 3779 - protein, 22 aa, synthetic construct
  REGION 1..22: note = TNR1B Linker (25-46)
QHTQPTPEPSTAPSTSFLLPMG

SEQ ID NO: 3780 - protein, 21 aa, synthetic construct
  REGION 1..21: note = TNR1B Linker (26-46)
HTQPTPEPSTAPSTSFLLPMG

SEQ ID NO: 3781 - protein, 20 aa, synthetic construct
  REGION 1..20: note = TNR1B Linker (27-46)
TQPTPEPSTAPSTSFLLPMG

SEQ ID NO: 3782 - protein, 19 aa, synthetic construct
  REGION 1..19: note = TNR1B Linker (28-46)
QPTPEPSTAPSTSFLLPMG

SEQ ID NO: 3783 - protein, 18 aa, synthetic construct
  REGION 1..18: note = TNR1B Linker (29-46)
PTPEPSTAPSTSFLLPMG

SEQ ID NO: 3784 - protein, 17 aa, synthetic construct
  REGION 1..17: note = TNR1B Linker (30-46)
TPEPSTAPSTSFLLPMG

SEQ ID NO: 3785 - protein, 16 aa, synthetic construct
  REGION 1..16: note = TNR1B Linker (31-46)
PEPSTAPSTSFLLPMG

SEQ ID NO: 3786 - protein, 15 aa, synthetic construct
  REGION 1..15: note = TNR1B Linker (32-46)
EPSTAPSTSFLLPMG

SEQ ID NO: 3787 - protein, 14 aa, synthetic construct
  REGION 1..14: note = TNR1B Linker (33-46)
PSTAPSTSFLLPMG

SEQ ID NO: 3788 - protein, 13 aa, synthetic construct
  REGION 1..13: note = TNR1B Linker (34-46)
STAPSTSFLLPMG

SEQ ID NO: 3789 - protein, 12 aa, synthetic construct
  REGION 1..12: note = TNR1B Linker (35-46)
TAPSTSFLLPMG

SEQ ID NO: 3790 - protein, 11 aa, synthetic construct
  REGION 1..11: note = TNR1B Linker (36-46)
APSTSFLLPMG

SEQ ID NO: 3791 - protein, 10 aa, synthetic construct
  REGION 1..10: note = TNR1B Linker (37-46)
PSTSFLLPMG

SEQ ID NO: 3792 - protein, 9 aa, synthetic construct
  REGION 1..9: note = TNR1B Linker (38-46)
STSFLLPMG

SEQ ID NO: 3793 - protein, 8 aa, synthetic construct
  REGION 1..8: note = TNR1B Linker (39-46)
TSFLLPMG

SEQ ID NO: 3794 - protein, 7 aa, synthetic construct
  REGION 1..7: note = TNR1B Linker (40-46)
SFLLPMG

SEQ ID NO: 3795 - protein, 6 aa, synthetic construct
  REGION 1..6: note = TNR1B Linker (41-46)
FLLPMG

SEQ ID NO: 3796 - protein, 5 aa, synthetic construct
  REGION 1..5: note = TNR1B Linker (42-46)
LLPMG

SEQ ID NO: 3797 - protein, 45 aa, synthetic construct
  REGION 1..45: note = TNR1B Linker (1-45)
TSTSPTRSMAPGAVHLPQPVSTRSQHTQPTPEPSTAPSTSFLLPM

SEQ ID NO: 3798 - protein, 44 aa, synthetic construct
  REGION 1..44: note = TNR1B Linker (2-45)
STSPTRSMAPGAVHLPQPVSTRSQHTQPTPEPSTAPSTSFLLPM

SEQ ID NO: 3799 - protein, 43 aa, synthetic construct
  REGION 1..43: note = TNR1B Linker (3-45)
TSPTRSMAPGAVHLPQPVSTRSQHTQPTPEPSTAPSTSFLLPM

SEQ ID NO: 3800 - protein, 42 aa, synthetic construct
  REGION 1..42: note = TNR1B Linker (4-45)
SPTRSMAPGAVHLPQPVSTRSQHTQPTPEPSTAPSTSFLLPM

SEQ ID NO: 3801 - protein, 41 aa, synthetic construct
  REGION 1..41: note = TNR1B Linker (5-45)
PTRSMAPGAVHLPQPVSTRSQHTQPTPEPSTAPSTSFLLPM

SEQ ID NO: 3802 - protein, 40 aa, synthetic construct
  REGION 1..40: note = TNR1B Linker (6-45)
TRSMAPGAVHLPQPVSTRSQHTQPTPEPSTAPSTSFLLPM

SEQ ID NO: 3803 - protein, 39 aa, synthetic construct
  REGION 1..39: note = TNR1B Linker (7-45)
RSMAPGAVHLPQPVSTRSQHTQPTPEPSTAPSTSFLLPM

SEQ ID NO: 3804 - protein, 38 aa, synthetic construct
  REGION 1..38: note = TNR1B Linker (8-45)
SMAPGAVHLPQPVSTRSQHTQPTPEPSTAPSTSFLLPM

SEQ ID NO: 3805 - protein, 37 aa, synthetic construct
  REGION 1..37: note = TNR1B Linker (9-45)
MAPGAVHLPQPVSTRSQHTQPTPEPSTAPSTSFLLPM

SEQ ID NO: 3806 - protein, 36 aa, synthetic construct
  REGION 1..36: note = TNR1B Linker (10-45)
APGAVHLPQPVSTRSQHTQPTPEPSTAPSTSFLLPM

SEQ ID NO: 3807 - protein, 35 aa, synthetic construct
  REGION 1..35: note = TNR1B Linker (11-45)
PGAVHLPQPVSTRSQHTQPTPEPSTAPSTSFLLPM

SEQ ID NO: 3808 - protein, 34 aa, synthetic construct
  REGION 1..34: note = TNR1B Linker (12-45)
GAVHLPQPVSTRSQHTQPTPEPSTAPSTSFLLPM

SEQ ID NO: 3809 - protein, 33 aa, synthetic construct
  REGION 1..33: note = TNR1B Linker (13-45)
AVHLPQPVSTRSQHTQPTPEPSTAPSTSFLLPM

SEQ ID NO: 3810 - protein, 32 aa, synthetic construct
  REGION 1..32: note = TNR1B Linker (14-45)
VHLPQPVSTRSQHTQPTPEPSTAPSTSFLLPM

SEQ ID NO: 3811 - protein, 31 aa, synthetic construct
  REGION 1..31: note = TNR1B Linker (15-45)
HLPQPVSTRSQHTQPTPEPSTAPSTSFLLPM

SEQ ID NO: 3812 - protein, 30 aa, synthetic construct
  REGION 1..30: note = TNR1B Linker (16-45)
LPQPVSTRSQHTQPTPEPSTAPSTSFLLPM

SEQ ID NO: 3813 - protein, 29 aa, synthetic construct
  REGION 1..29: note = TNR1B Linker (17-45)
PQPVSTRSQHTQPTPEPSTAPSTSFLLPM

SEQ ID NO: 3814 - protein, 28 aa, synthetic construct
  REGION 1..28: note = TNR1B Linker (18-45)
QPVSTRSQHTQPTPEPSTAPSTSFLLPM

SEQ ID NO: 3815 - protein, 27 aa, synthetic construct
  REGION 1..27: note = TNR1B Linker (19-45)
PVSTRSQHTQPTPEPSTAPSTSFLLPM

SEQ ID NO: 3816 - protein, 26 aa, synthetic construct
  REGION 1..26: note = TNR1B Linker (20-45)
VSTRSQHTQPTPEPSTAPSTSFLLPM

SEQ ID NO: 3817 - protein, 25 aa, synthetic construct
  REGION 1..25: note = TNR1B Linker (21-45)
STRSQHTQPTPEPSTAPSTSFLLPM

SEQ ID NO: 3818 - protein, 24 aa, synthetic construct
  REGION 1..24: note = TNR1B Linker (22-45)
TRSQHTQPTPEPSTAPSTSFLLPM

SEQ ID NO: 3819 - protein, 23 aa, synthetic construct
  REGION 1..23: note = TNR1B Linker (23-45)
RSQHTQPTPEPSTAPSTSFLLPM

SEQ ID NO: 3820 - protein, 22 aa, synthetic construct
  REGION 1..22: note = TNR1B Linker (24-45)
SQHTQPTPEPSTAPSTSFLLPM

SEQ ID NO: 3821 - protein, 21 aa, synthetic construct
  REGION 1..21: note = TNR1B Linker (25-45)
QHTQPTPEPSTAPSTSFLLPM

SEQ ID NO: 3822 - protein, 20 aa, synthetic construct
  REGION 1..20: note = TNR1B Linker (26-45)
HTQPTPEPSTAPSTSFLLPM

SEQ ID NO: 3823 - protein, 19 aa, synthetic construct
  REGION 1..19: note = TNR1B Linker (27-45)
TQPTPEPSTAPSTSFLLPM

SEQ ID NO: 3824 - protein, 18 aa, synthetic construct
  REGION 1..18: note = TNR1B Linker (28-45)
QPTPEPSTAPSTSFLLPM

SEQ ID NO: 3825 - protein, 17 aa, synthetic construct
  REGION 1..17: note = TNR1B Linker (29-45)
PTPEPSTAPSTSFLLPM

SEQ ID NO: 3826 - protein, 16 aa, synthetic construct
  REGION 1..16: note = TNR1B Linker (30-45)
TPEPSTAPSTSFLLPM

SEQ ID NO: 3827 - protein, 15 aa, synthetic construct
  REGION 1..15: note = TNR1B Linker (31-45)
PEPSTAPSTSFLLPM

SEQ ID NO: 3828 - protein, 14 aa, synthetic construct
  REGION 1..14: note = TNR1B Linker (32-45)
EPSTAPSTSFLLPM

SEQ ID NO: 3829 - protein, 13 aa, synthetic construct
  REGION 1..13: note = TNR1B Linker (33-45)
PSTAPSTSFLLPM

SEQ ID NO: 3830 - protein, 12 aa, synthetic construct
  REGION 1..12: note = TNR1B Linker (34-45)
STAPSTSFLLPM

SEQ ID NO: 3831 - protein, 11 aa, synthetic construct
  REGION 1..11: note = TNR1B Linker (35-45)
TAPSTSFLLPM

SEQ ID NO: 3832 - protein, 10 aa, synthetic construct
  REGION 1..10: note = TNR1B Linker (36-45)
APSTSFLLPM

SEQ ID NO: 3833 - protein, 9 aa, synthetic construct
  REGION 1..9: note = TNR1B Linker (37-45)
PSTSFLLPM

SEQ ID NO: 3834 - protein, 8 aa, synthetic construct
  REGION 1..8: note = TNR1B Linker (38-45)
STSFLLPM

SEQ ID NO: 3835 - protein, 7 aa, synthetic construct
  REGION 1..7: note = TNR1B Linker (39-45)
TSFLLPM

SEQ ID NO: 3836 - protein, 6 aa, synthetic construct
  REGION 1..6: note = TNR1B Linker (40-45)
SFLLPM

SEQ ID NO: 3837 - protein, 5 aa, synthetic construct
  REGION 1..5: note = TNR1B Linker (41-45)
FLLPM

SEQ ID NO: 3838 - protein, 44 aa, synthetic construct
  REGION 1..44: note = TNR1B Linker (1-44)
TSTSPTRSMAPGAVHLPQPVSTRSQHTQPTPEPSTAPSTSFLLP

SEQ ID NO: 3839 - protein, 43 aa, synthetic construct
  REGION 1..43: note = TNR1B Linker (2-44)
STSPTRSMAPGAVHLPQPVSTRSQHTQPTPEPSTAPSTSFLLP

SEQ ID NO: 3840 - protein, 42 aa, synthetic construct
  REGION 1..42: note = TNR1B Linker (3-44)
TSPTRSMAPGAVHLPQPVSTRSQHTQPTPEPSTAPSTSFLLP

SEQ ID NO: 3841 - protein, 41 aa, synthetic construct
  REGION 1..41: note = TNR1B Linker (4-44)
SPTRSMAPGAVHLPQPVSTRSQHTQPTPEPSTAPSTSFLLP

SEQ ID NO: 3842 - protein, 40 aa, synthetic construct
  REGION 1..40: note = TNR1B Linker (5-44)
PTRSMAPGAVHLPQPVSTRSQHTQPTPEPSTAPSTSFLLP

SEQ ID NO: 3843 - protein, 39 aa, synthetic construct
  REGION 1..39: note = TNR1B Linker (6-44)
TRSMAPGAVHLPQPVSTRSQHTQPTPEPSTAPSTSFLLP

SEQ ID NO: 3844 - protein, 38 aa, synthetic construct
  REGION 1..38: note = TNR1B Linker (7-44)
RSMAPGAVHLPQPVSTRSQHTQPTPEPSTAPSTSFLLP

SEQ ID NO: 3845 - protein, 37 aa, synthetic construct
  REGION 1..37: note = TNR1B Linker (8-44)
SMAPGAVHLPQPVSTRSQHTQPTPEPSTAPSTSFLLP

SEQ ID NO: 3846 - protein, 36 aa, synthetic construct
  REGION 1..36: note = TNR1B Linker (9-44)
MAPGAVHLPQPVSTRSQHTQPTPEPSTAPSTSFLLP

SEQ ID NO: 3847 - protein, 35 aa, synthetic construct
  REGION 1..35: note = TNR1B Linker (10-44)
APGAVHLPQPVSTRSQHTQPTPEPSTAPSTSFLLP

SEQ ID NO: 3848 - protein, 34 aa, synthetic construct
  REGION 1..34: note = TNR1B Linker (11-44)
PGAVHLPQPVSTRSQHTQPTPEPSTAPSTSFLLP

SEQ ID NO: 3849 - protein, 33 aa, synthetic construct
  REGION 1..33: note = TNR1B Linker (12-44)
GAVHLPQPVSTRSQHTQPTPEPSTAPSTSFLLP

SEQ ID NO: 3850 - protein, 32 aa, synthetic construct
  REGION 1..32: note = TNR1B Linker (13-44)
AVHLPQPVSTRSQHTQPTPEPSTAPSTSFLLP

SEQ ID NO: 3851 - protein, 31 aa, synthetic construct
  REGION 1..31: note = TNR1B Linker (14-44)
VHLPQPVSTRSQHTQPTPEPSTAPSTSFLLP

SEQ ID NO: 3852 - protein, 30 aa, synthetic construct
  REGION 1..30: note = TNR1B Linker (15-44)
HLPQPVSTRSQHTQPTPEPSTAPSTSFLLP

SEQ ID NO: 3853 - protein, 29 aa, synthetic construct
  REGION 1..29: note = TNR1B Linker (16-44)
LPQPVSTRSQHTQPTPEPSTAPSTSFLLP

SEQ ID NO: 3854 - protein, 28 aa, synthetic construct
  REGION 1..28: note = TNR1B Linker (17-44)
PQPVSTRSQHTQPTPEPSTAPSTSFLLP

SEQ ID NO: 3855 - protein, 27 aa, synthetic construct
  REGION 1..27: note = TNR1B Linker (18-44)
QPVSTRSQHTQPTPEPSTAPSTSFLLP

SEQ ID NO: 3856 - protein, 26 aa, synthetic construct
  REGION 1..26: note = TNR1B Linker (19-44)
PVSTRSQHTQPTPEPSTAPSTSFLLP

SEQ ID NO: 3857 - protein, 25 aa, synthetic construct
  REGION 1..25: note = TNR1B Linker (20-44)
VSTRSQHTQPTPEPSTAPSTSFLLP

SEQ ID NO: 3858 - protein, 24 aa, synthetic construct
  REGION 1..24: note = TNR1B Linker (21-44)
STRSQHTQPTPEPSTAPSTSFLLP

SEQ ID NO: 3859 - protein, 23 aa, synthetic construct
  REGION 1..23: note = TNR1B Linker (22-44)
TRSQHTQPTPEPSTAPSTSFLLP

SEQ ID NO: 3860 - protein, 22 aa, synthetic construct
  REGION 1..22: note = TNR1B Linker (23-44)
RSQHTQPTPEPSTAPSTSFLLP

SEQ ID NO: 3861 - protein, 21 aa, synthetic construct
  REGION 1..21: note = TNR1B Linker (24-44)
SQHTQPTPEPSTAPSTSFLLP

SEQ ID NO: 3862 - protein, 20 aa, synthetic construct
  REGION 1..20: note = TNR1B Linker (25-44)
QHTQPTPEPSTAPSTSFLLP

SEQ ID NO: 3863 - protein, 19 aa, synthetic construct
  REGION 1..19: note = TNR1B Linker (26-44)
HTQPTPEPSTAPSTSFLLP

SEQ ID NO: 3864 - protein, 18 aa, synthetic construct
  REGION 1..18: note = TNR1B Linker (27-44)
TQPTPEPSTAPSTSFLLP

SEQ ID NO: 3865 - protein, 17 aa, synthetic construct
  REGION 1..17: note = TNR1B Linker (28-44)
QPTPEPSTAPSTSFLLP

SEQ ID NO: 3866 - protein, 16 aa, synthetic construct
  REGION 1..16: note = TNR1B Linker (29-44)
PTPEPSTAPSTSFLLP

SEQ ID NO: 3867 - protein, 15 aa, synthetic construct
  REGION 1..15: note = TNR1B Linker (30-44)
TPEPSTAPSTSFLLP

SEQ ID NO: 3868 - protein, 14 aa, synthetic construct
  REGION 1..14: note = TNR1B Linker (31-44)
PEPSTAPSTSFLLP

SEQ ID NO: 3869 - protein, 13 aa, synthetic construct
  REGION 1..13: note = TNR1B Linker (32-44)
EPSTAPSTSFLLP

SEQ ID NO: 3870 - protein, 12 aa, synthetic construct
  REGION 1..12: note = TNR1B Linker (33-44)
PSTAPSTSFLLP

SEQ ID NO: 3871 - protein, 11 aa, synthetic construct
  REGION 1..11: note = TNR1B Linker (34-44)
STAPSTSFLLP

SEQ ID NO: 3872 - protein, 10 aa, synthetic construct
  REGION 1..10: note = TNR1B Linker (35-44)
TAPSTSFLLP

SEQ ID NO: 3873 - protein, 9 aa, synthetic construct
  REGION 1..9: note = TNR1B Linker (36-44)
APSTSFLLP

SEQ ID NO: 3874 - protein, 8 aa, synthetic construct
  REGION 1..8: note = TNR1B Linker (37-44)
PSTSFLLP

SEQ ID NO: 3875 - protein, 7 aa, synthetic construct
  REGION 1..7: note = TNR1B Linker (38-44)
STSFLLP

SEQ ID NO: 3876 - protein, 6 aa, synthetic construct
  REGION 1..6: note = TNR1B Linker (39-44)
TSFLLP

SEQ ID NO: 3877 - protein, 5 aa, synthetic construct
  REGION 1..5: note = TNR1B Linker (40-44)
SFLLP

SEQ ID NO: 3878 - protein, 43 aa, synthetic construct
  REGION 1..43: note = TNR1B Linker (1-43)
TSTSPTRSMAPGAVHLPQPVSTRSQHTQPTPEPSTAPSTSFLL

SEQ ID NO: 3879 - protein, 42 aa, synthetic construct
  REGION 1..42: note = TNR1B Linker (2-43)
STSPTRSMAPGAVHLPQPVSTRSQHTQPTPEPSTAPSTSFLL

SEQ ID NO: 3880 - protein, 41 aa, synthetic construct
  REGION 1..41: note = TNR1B Linker (3-43)
TSPTRSMAPGAVHLPQPVSTRSQHTQPTPEPSTAPSTSFLL

SEQ ID NO: 3881 - protein, 40 aa, synthetic construct
  REGION 1..40: note = TNR1B Linker (4-43)
SPTRSMAPGAVHLPQPVSTRSQHTQPTPEPSTAPSTSFLL

SEQ ID NO: 3882 - protein, 39 aa, synthetic construct
  REGION 1..39: note = TNR1B Linker (5-43)
PTRSMAPGAVHLPQPVSTRSQHTQPTPEPSTAPSTSFLL

SEQ ID NO: 3883 - protein, 38 aa, synthetic construct
  REGION 1..38: note = TNR1B Linker (6-43)
TRSMAPGAVHLPQPVSTRSQHTQPTPEPSTAPSTSFLL

SEQ ID NO: 3884 - protein, 37 aa, synthetic construct
  REGION 1..37: note = TNR1B Linker (7-43)
RSMAPGAVHLPQPVSTRSQHTQPTPEPSTAPSTSFLL

SEQ ID NO: 3885 - protein, 36 aa, synthetic construct
  REGION 1..36: note = TNR1B Linker (8-43)
SMAPGAVHLPQPVSTRSQHTQPTPEPSTAPSTSFLL

SEQ ID NO: 3886 - protein, 35 aa, synthetic construct
  REGION 1..35: note = TNR1B Linker (9-43)
MAPGAVHLPQPVSTRSQHTQPTPEPSTAPSTSFLL

SEQ ID NO: 3887 - protein, 34 aa, synthetic construct
  REGION 1..34: note = TNR1B Linker (10-43)
APGAVHLPQPVSTRSQHTQPTPEPSTAPSTSFLL

SEQ ID NO: 3888 - protein, 33 aa, synthetic construct
  REGION 1..33: note = TNR1B Linker (11-43)
PGAVHLPQPVSTRSQHTQPTPEPSTAPSTSFLL

SEQ ID NO: 3889 - protein, 32 aa, synthetic construct
  REGION 1..32: note = TNR1B Linker (12-43)
GAVHLPQPVSTRSQHTQPTPEPSTAPSTSFLL

SEQ ID NO: 3890 - protein, 31 aa, synthetic construct
  REGION 1..31: note = TNR1B Linker (13-43)
AVHLPQPVSTRSQHTQPTPEPSTAPSTSFLL

SEQ ID NO: 3891 - protein, 30 aa, synthetic construct
  REGION 1..30: note = TNR1B Linker (14-43)
VHLPQPVSTRSQHTQPTPEPSTAPSTSFLL

SEQ ID NO: 3892 - protein, 29 aa, synthetic construct
  REGION 1..29: note = TNR1B Linker (15-43)
HLPQPVSTRSQHTQPTPEPSTAPSTSFLL

SEQ ID NO: 3893 - protein, 28 aa, synthetic construct
  REGION 1..28: note = TNR1B Linker (16-43)
LPQPVSTRSQHTQPTPEPSTAPSTSFLL

SEQ ID NO: 3894 - protein, 27 aa, synthetic construct
  REGION 1..27: note = TNR1B Linker (17-43)
PQPVSTRSQHTQPTPEPSTAPSTSFLL

SEQ ID NO: 3895 - protein, 26 aa, synthetic construct
  REGION 1..26: note = TNR1B Linker (18-43)
QPVSTRSQHTQPTPEPSTAPSTSFLL

SEQ ID NO: 3896 - protein, 25 aa, synthetic construct
  REGION 1..25: note = TNR1B Linker (19-43)
PVSTRSQHTQPTPEPSTAPSTSFLL

SEQ ID NO: 3897 - protein, 24 aa, synthetic construct
  REGION 1..24: note = TNR1B Linker (20-43)
VSTRSQHTQPTPEPSTAPSTSFLL

SEQ ID NO: 3898 - protein, 23 aa, synthetic construct
  REGION 1..23: note = TNR1B Linker (21-43)
STRSQHTQPTPEPSTAPSTSFLL

SEQ ID NO: 3899 - protein, 22 aa, synthetic construct
  REGION 1..22: note = TNR1B Linker (22-43)
TRSQHTQPTPEPSTAPSTSFLL

SEQ ID NO: 3900 - protein, 21 aa, synthetic construct
  REGION 1..21: note = TNR1B Linker (23-43)
RSQHTQPTPEPSTAPSTSFLL

SEQ ID NO: 3901 - protein, 20 aa, synthetic construct
  REGION 1..20: note = TNR1B Linker (24-43)
SQHTQPTPEPSTAPSTSFLL

SEQ ID NO: 3902 - protein, 19 aa, synthetic construct
  REGION 1..19: note = TNR1B Linker (25-43)
QHTQPTPEPSTAPSTSFLL

SEQ ID NO: 3903 - protein, 18 aa, synthetic construct
  REGION 1..18: note = TNR1B Linker (26-43)
HTQPTPEPSTAPSTSFLL

SEQ ID NO: 3904 - protein, 17 aa, synthetic construct
  REGION 1..17: note = TNR1B Linker (27-43)
TQPTPEPSTAPSTSFLL

SEQ ID NO: 3905 - protein, 16 aa, synthetic construct
  REGION 1..16: note = TNR1B Linker (28-43)
QPTPEPSTAPSTSFLL

SEQ ID NO: 3906 - protein, 15 aa, synthetic construct
  REGION 1..15: note = TNR1B Linker (29-43)
PTPEPSTAPSTSFLL

SEQ ID NO: 3907 - protein, 14 aa, synthetic construct
  REGION 1..14: note = TNR1B Linker (30-43)
TPEPSTAPSTSFLL

SEQ ID NO: 3908 - protein, 13 aa, synthetic construct
  REGION 1..13: note = TNR1B Linker (31-43)
PEPSTAPSTSFLL

SEQ ID NO: 3909 - protein, 12 aa, synthetic construct
  REGION 1..12: note = TNR1B Linker (32-43)
EPSTAPSTSFLL

SEQ ID NO: 3910 - protein, 11 aa, synthetic construct
  REGION 1..11: note = TNR1B Linker (33-43)
PSTAPSTSFLL

SEQ ID NO: 3911 - protein, 10 aa, synthetic construct
  REGION 1..10: note = TNR1B Linker (34-43)
STAPSTSFLL

SEQ ID NO: 3912 - protein, 9 aa, synthetic construct
  REGION 1..9: note = TNR1B Linker (35-43)
TAPSTSFLL

SEQ ID NO: 3913 - protein, 8 aa, synthetic construct
  REGION 1..8: note = TNR1B Linker (36-43)
APSTSFLL

SEQ ID NO: 3914 - protein, 7 aa, synthetic construct
  REGION 1..7: note = TNR1B Linker (37-43)
PSTSFLL

SEQ ID NO: 3915 - protein, 6 aa, synthetic construct
  REGION 1..6: note = TNR1B Linker (38-43)
STSFLL

SEQ ID NO: 3916 - protein, 5 aa, synthetic construct
  REGION 1..5: note = TNR1B Linker (39-43)
TSFLL

SEQ ID NO: 3917 - protein, 42 aa, synthetic construct
  REGION 1..42: note = TNR1B Linker (1-42)
TSTSPTRSMAPGAVHLPQPVSTRSQHTQPTPEPSTAPSTSFL

SEQ ID NO: 3918 - protein, 41 aa, synthetic construct
  REGION 1..41: note = TNR1B Linker (2-42)
STSPTRSMAPGAVHLPQPVSTRSQHTQPTPEPSTAPSTSFL

SEQ ID NO: 3919 - protein, 40 aa, synthetic construct
  REGION 1..40: note = TNR1B Linker (3-42)
TSPTRSMAPGAVHLPQPVSTRSQHTQPTPEPSTAPSTSFL

SEQ ID NO: 3920 - protein, 39 aa, synthetic construct
  REGION 1..39: note = TNR1B Linker (4-42)
SPTRSMAPGAVHLPQPVSTRSQHTQPTPEPSTAPSTSFL

SEQ ID NO: 3921 - protein, 38 aa, synthetic construct
  REGION 1..38: note = TNR1B Linker (5-42)
PTRSMAPGAVHLPQPVSTRSQHTQPTPEPSTAPSTSFL

SEQ ID NO: 3922 - protein, 37 aa, synthetic construct
  REGION 1..37: note = TNR1B Linker (6-42)
TRSMAPGAVHLPQPVSTRSQHTQPTPEPSTAPSTSFL

SEQ ID NO: 3923 - protein, 36 aa, synthetic construct
  REGION 1..36: note = TNR1B Linker (7-42)
RSMAPGAVHLPQPVSTRSQHTQPTPEPSTAPSTSFL

SEQ ID NO: 3924 - protein, 35 aa, synthetic construct
  REGION 1..35: note = TNR1B Linker (8-42)
SMAPGAVHLPQPVSTRSQHTQPTPEPSTAPSTSFL

SEQ ID NO: 3925 - protein, 34 aa, synthetic construct
  REGION 1..34: note = TNR1B Linker (9-42)
MAPGAVHLPQPVSTRSQHTQPTPEPSTAPSTSFL

SEQ ID NO: 3926 - protein, 33 aa, synthetic construct
  REGION 1..33: note = TNR1B Linker (10-42)
APGAVHLPQPVSTRSQHTQPTPEPSTAPSTSFL

SEQ ID NO: 3927 - protein, 32 aa, synthetic construct
  REGION 1..32: note = TNR1B Linker (11-42)
PGAVHLPQPVSTRSQHTQPTPEPSTAPSTSFL

SEQ ID NO: 3928 - protein, 31 aa, synthetic construct
  REGION 1..31: note = TNR1B Linker (12-42)
GAVHLPQPVSTRSQHTQPTPEPSTAPSTSFL

SEQ ID NO: 3929 - protein, 30 aa, synthetic construct
  REGION 1..30: note = TNR1B Linker (13-42)
AVHLPQPVSTRSQHTQPTPEPSTAPSTSFL

SEQ ID NO: 3930 - protein, 29 aa, synthetic construct
  REGION 1..29: note = TNR1B Linker (14-42)
VHLPQPVSTRSQHTQPTPEPSTAPSTSFL

SEQ ID NO: 3931 - protein, 28 aa, synthetic construct
  REGION 1..28: note = TNR1B Linker (15-42)
HLPQPVSTRSQHTQPTPEPSTAPSTSFL

SEQ ID NO: 3932 - protein, 27 aa, synthetic construct
  REGION 1..27: note = TNR1B Linker (16-42)
LPQPVSTRSQHTQPTPEPSTAPSTSFL

SEQ ID NO: 3933 - protein, 26 aa, synthetic construct
  REGION 1..26: note = TNR1B Linker (17-42)
PQPVSTRSQHTQPTPEPSTAPSTSFL

SEQ ID NO: 3934 - protein, 25 aa, synthetic construct
  REGION 1..25: note = TNR1B Linker (18-42)
QPVSTRSQHTQPTPEPSTAPSTSFL

SEQ ID NO: 3935 - protein, 24 aa, synthetic construct
  REGION 1..24: note = TNR1B Linker (19-42)
PVSTRSQHTQPTPEPSTAPSTSFL

SEQ ID NO: 3936 - protein, 23 aa, synthetic construct
  REGION 1..23: note = TNR1B Linker (20-42)
VSTRSQHTQPTPEPSTAPSTSFL

SEQ ID NO: 3937 - protein, 22 aa, synthetic construct
  REGION 1..22: note = TNR1B Linker (21-42)
STRSQHTQPTPEPSTAPSTSFL

SEQ ID NO: 3938 - protein, 21 aa, synthetic construct
  REGION 1..21: note = TNR1B Linker (22-42)
TRSQHTQPTPEPSTAPSTSFL

SEQ ID NO: 3939 - protein, 20 aa, synthetic construct
  REGION 1..20: note = TNR1B Linker (23-42)
RSQHTQPTPEPSTAPSTSFL

SEQ ID NO: 3940 - protein, 19 aa, synthetic construct
  REGION 1..19: note = TNR1B Linker (24-42)
SQHTQPTPEPSTAPSTSFL

SEQ ID NO: 3941 - protein, 18 aa, synthetic construct
  REGION 1..18: note = TNR1B Linker (25-42)
QHTQPTPEPSTAPSTSFL

SEQ ID NO: 3942 - protein, 17 aa, synthetic construct
  REGION 1..17: note = TNR1B Linker (26-42)
HTQPTPEPSTAPSTSFL

SEQ ID NO: 3943 - protein, 16 aa, synthetic construct
  REGION 1..16: note = TNR1B Linker (27-42)
TQPTPEPSTAPSTSFL

SEQ ID NO: 3944 - protein, 15 aa, synthetic construct
  REGION 1..15: note = TNR1B Linker (28-42)
QPTPEPSTAPSTSFL

SEQ ID NO: 3945 - protein, 14 aa, synthetic construct
  REGION 1..14: note = TNR1B Linker (29-42)
PTPEPSTAPSTSFL

SEQ ID NO: 3946 - protein, 13 aa, synthetic construct
  REGION 1..13: note = TNR1B Linker (30-42)
TPEPSTAPSTSFL

SEQ ID NO: 3947 - protein, 12 aa, synthetic construct
  REGION 1..12: note = TNR1B Linker (31-42)
PEPSTAPSTSFL

SEQ ID NO: 3948 - protein, 11 aa, synthetic construct
  REGION 1..11: note = TNR1B Linker (32-42)
EPSTAPSTSFL

SEQ ID NO: 3949 - protein, 10 aa, synthetic construct
  REGION 1..10: note = TNR1B Linker (33-42)
PSTAPSTSFL

SEQ ID NO: 3950 - protein, 9 aa, synthetic construct
  REGION 1..9: note = TNR1B Linker (34-42)
STAPSTSFL

SEQ ID NO: 3951 - protein, 8 aa, synthetic construct
  REGION 1..8: note = TNR1B Linker (35-42)
TAPSTSFL

SEQ ID NO: 3952 - protein, 7 aa, synthetic construct
  REGION 1..7: note = TNR1B Linker (36-42)
APSTSFL

SEQ ID NO: 3953 - protein, 6 aa, synthetic construct
  REGION 1..6: note = TNR1B Linker (37-42)
PSTSFL

SEQ ID NO: 3954 - protein, 5 aa, synthetic construct
  REGION 1..5: note = TNR1B Linker (38-42)
STSFL

SEQ ID NO: 3955 - protein, 41 aa, synthetic construct
  REGION 1..41: note = TNR1B Linker (1-41)
TSTSPTRSMAPGAVHLPQPVSTRSQHTQPTPEPSTAPSTSF

SEQ ID NO: 3956 - protein, 40 aa, synthetic construct
  REGION 1..40: note = TNR1B Linker (2-41)
STSPTRSMAPGAVHLPQPVSTRSQHTQPTPEPSTAPSTSF

SEQ ID NO: 3957 - protein, 39 aa, synthetic construct
  REGION 1..39: note = TNR1B Linker (3-41)
TSPTRSMAPGAVHLPQPVSTRSQHTQPTPEPSTAPSTSF

SEQ ID NO: 3958 - protein, 38 aa, synthetic construct
  REGION 1..38: note = TNR1B Linker (4-41)
SPTRSMAPGAVHLPQPVSTRSQHTQPTPEPSTAPSTSF

SEQ ID NO: 3959 - protein, 37 aa, synthetic construct
  REGION 1..37: note = TNR1B Linker (5-41)
PTRSMAPGAVHLPQPVSTRSQHTQPTPEPSTAPSTSF

SEQ ID NO: 3960 - protein, 36 aa, synthetic construct
  REGION 1..36: note = TNR1B Linker (6-41)
TRSMAPGAVHLPQPVSTRSQHTQPTPEPSTAPSTSF

SEQ ID NO: 3961 - protein, 35 aa, synthetic construct
  REGION 1..35: note = TNR1B Linker (7-41)
RSMAPGAVHLPQPVSTRSQHTQPTPEPSTAPSTSF

SEQ ID NO: 3962 - protein, 34 aa, synthetic construct
  REGION 1..34: note = TNR1B Linker (8-41)
SMAPGAVHLPQPVSTRSQHTQPTPEPSTAPSTSF

SEQ ID NO: 3963 - protein, 33 aa, synthetic construct
  REGION 1..33: note = TNR1B Linker (9-41)
MAPGAVHLPQPVSTRSQHTQPTPEPSTAPSTSF

SEQ ID NO: 3964 - protein, 32 aa, synthetic construct
  REGION 1..32: note = TNR1B Linker (10-41)
APGAVHLPQPVSTRSQHTQPTPEPSTAPSTSF

SEQ ID NO: 3965 - protein, 31 aa, synthetic construct
  REGION 1..31: note = TNR1B Linker (11-41)
PGAVHLPQPVSTRSQHTQPTPEPSTAPSTSF

SEQ ID NO: 3966 - protein, 30 aa, synthetic construct
  REGION 1..30: note = TNR1B Linker (12-41)
GAVHLPQPVSTRSQHTQPTPEPSTAPSTSF

SEQ ID NO: 3967 - protein, 29 aa, synthetic construct
  REGION 1..29: note = TNR1B Linker (13-41)
AVHLPQPVSTRSQHTQPTPEPSTAPSTSF

SEQ ID NO: 3968 - protein, 28 aa, synthetic construct
  REGION 1..28: note = TNR1B Linker (14-41)
VHLPQPVSTRSQHTQPTPEPSTAPSTSF

SEQ ID NO: 3969 - protein, 27 aa, synthetic construct
  REGION 1..27: note = TNR1B Linker (15-41)
HLPQPVSTRSQHTQPTPEPSTAPSTSF

SEQ ID NO: 3970 - protein, 26 aa, synthetic construct
  REGION 1..26: note = TNR1B Linker (16-41)
LPQPVSTRSQHTQPTPEPSTAPSTSF

SEQ ID NO: 3971 - protein, 25 aa, synthetic construct
  REGION 1..25: note = TNR1B Linker (17-41)
PQPVSTRSQHTQPTPEPSTAPSTSF

SEQ ID NO: 3972 - protein, 24 aa, synthetic construct
  REGION 1..24: note = TNR1B Linker (18-41)
QPVSTRSQHTQPTPEPSTAPSTSF

SEQ ID NO: 3973 - protein, 23 aa, synthetic construct
  REGION 1..23: note = TNR1B Linker (19-41)
PVSTRSQHTQPTPEPSTAPSTSF

SEQ ID NO: 3974 - protein, 22 aa, synthetic construct
  REGION 1..22: note = TNR1B Linker (20-41)
VSTRSQHTQPTPEPSTAPSTSF

SEQ ID NO: 3975 - protein, 21 aa, synthetic construct
  REGION 1..21: note = TNR1B Linker (21-41)
STRSQHTQPTPEPSTAPSTSF

SEQ ID NO: 3976 - protein, 20 aa, synthetic construct
  REGION 1..20: note = TNR1B Linker (22-41)
TRSQHTQPTPEPSTAPSTSF

SEQ ID NO: 3977 - protein, 19 aa, synthetic construct
  REGION 1..19: note = TNR1B Linker (23-41)
RSQHTQPTPEPSTAPSTSF

SEQ ID NO: 3978 - protein, 18 aa, synthetic construct
  REGION 1..18: note = TNR1B Linker (24-41)
SQHTQPTPEPSTAPSTSF

SEQ ID NO: 3979 - protein, 17 aa, synthetic construct
  REGION 1..17: note = TNR1B Linker (25-41)
QHTQPTPEPSTAPSTSF

SEQ ID NO: 3980 - protein, 16 aa, synthetic construct
  REGION 1..16: note = TNR1B Linker (26-41)
HTQPTPEPSTAPSTSF

SEQ ID NO: 3981 - protein, 15 aa, synthetic construct
  REGION 1..15: note = TNR1B Linker (27-41)
TQPTPEPSTAPSTSF

SEQ ID NO: 3982 - protein, 14 aa, synthetic construct
  REGION 1..14: note = TNR1B Linker (28-41)
QPTPEPSTAPSTSF

SEQ ID NO: 3983 - protein, 13 aa, synthetic construct
  REGION 1..13: note = TNR1B Linker (29-41)
PTPEPSTAPSTSF

SEQ ID NO: 3984 - protein, 12 aa, synthetic construct
  REGION 1..12: note = TNR1B Linker (30-41)
TPEPSTAPSTSF

SEQ ID NO: 3985 - protein, 11 aa, synthetic construct
  REGION 1..11: note = TNR1B Linker (31-41)
PEPSTAPSTSF

SEQ ID NO: 3986 - protein, 10 aa, synthetic construct
  REGION 1..10: note = TNR1B Linker (32-41)
EPSTAPSTSF

SEQ ID NO: 3987 - protein, 9 aa, synthetic construct
  REGION 1..9: note = TNR1B Linker (33-41)
PSTAPSTSF

SEQ ID NO: 3988 - protein, 8 aa, synthetic construct
  REGION 1..8: note = TNR1B Linker (34-41)
STAPSTSF

SEQ ID NO: 3989 - protein, 7 aa, synthetic construct
  REGION 1..7: note = TNR1B Linker (35-41)
TAPSTSF

SEQ ID NO: 3990 - protein, 6 aa, synthetic construct
  REGION 1..6: note = TNR1B Linker (36-41)
APSTSF

SEQ ID NO: 3991 - protein, 5 aa, synthetic construct
  REGION 1..5: note = TNR1B Linker (37-41)
PSTSF

SEQ ID NO: 3992 - protein, 40 aa, synthetic construct
  REGION 1..40: note = TNR1B Linker (1-40)
TSTSPTRSMAPGAVHLPQPVSTRSQHTQPTPEPSTAPSTS

SEQ ID NO: 3993 - protein, 39 aa, synthetic construct
  REGION 1..39: note = TNR1B Linker (2-40)
STSPTRSMAPGAVHLPQPVSTRSQHTQPTPEPSTAPSTS

SEQ ID NO: 3994 - protein, 38 aa, synthetic construct
  REGION 1..38: note = TNR1B Linker (3-40)
TSPTRSMAPGAVHLPQPVSTRSQHTQPTPEPSTAPSTS

SEQ ID NO: 3995 - protein, 37 aa, synthetic construct
  REGION 1..37: note = TNR1B Linker (4-40)
SPTRSMAPGAVHLPQPVSTRSQHTQPTPEPSTAPSTS

SEQ ID NO: 3996 - protein, 36 aa, synthetic construct
  REGION 1..36: note = TNR1B Linker (5-40)
PTRSMAPGAVHLPQPVSTRSQHTQPTPEPSTAPSTS

SEQ ID NO: 3997 - protein, 35 aa, synthetic construct
  REGION 1..35: note = TNR1B Linker (6-40)
TRSMAPGAVHLPQPVSTRSQHTQPTPEPSTAPSTS

SEQ ID NO: 3998 - protein, 34 aa, synthetic construct
  REGION 1..34: note = TNR1B Linker (7-40)
RSMAPGAVHLPQPVSTRSQHTQPTPEPSTAPSTS

SEQ ID NO: 3999 - protein, 33 aa, synthetic construct
  REGION 1..33: note = TNR1B Linker (8-40)
SMAPGAVHLPQPVSTRSQHTQPTPEPSTAPSTS

SEQ ID NO: 4000 - protein, 32 aa, synthetic construct
  REGION 1..32: note = TNR1B Linker (9-40)
MAPGAVHLPQPVSTRSQHTQPTPEPSTAPSTS

SEQ ID NO: 4001 - protein, 31 aa, synthetic construct
  REGION 1..31: note = TNR1B Linker (10-40)
APGAVHLPQPVSTRSQHTQPTPEPSTAPSTS

SEQ ID NO: 4002 - protein, 30 aa, synthetic construct
  REGION 1..30: note = TNR1B Linker (11-40)
PGAVHLPQPVSTRSQHTQPTPEPSTAPSTS

SEQ ID NO: 4003 - protein, 29 aa, synthetic construct
  REGION 1..29: note = TNR1B Linker (12-40)
GAVHLPQPVSTRSQHTQPTPEPSTAPSTS

SEQ ID NO: 4004 - protein, 28 aa, synthetic construct
  REGION 1..28: note = TNR1B Linker (13-40)
AVHLPQPVSTRSQHTQPTPEPSTAPSTS

SEQ ID NO: 4005 - protein, 27 aa, synthetic construct
  REGION 1..27: note = TNR1B Linker (14-40)
VHLPQPVSTRSQHTQPTPEPSTAPSTS

SEQ ID NO: 4006 - protein, 26 aa, synthetic construct
  REGION 1..26: note = TNR1B Linker (15-40)
HLPQPVSTRSQHTQPTPEPSTAPSTS

SEQ ID NO: 4007 - protein, 25 aa, synthetic construct
  REGION 1..25: note = TNR1B Linker (16-40)
LPQPVSTRSQHTQPTPEPSTAPSTS

SEQ ID NO: 4008 - protein, 24 aa, synthetic construct
  REGION 1..24: note = TNR1B Linker (17-40)
PQPVSTRSQHTQPTPEPSTAPSTS

SEQ ID NO: 4009 - protein, 23 aa, synthetic construct
  REGION 1..23: note = TNR1B Linker (18-40)
QPVSTRSQHTQPTPEPSTAPSTS

SEQ ID NO: 4010 - protein, 22 aa, synthetic construct
  REGION 1..22: note = TNR1B Linker (19-40)
PVSTRSQHTQPTPEPSTAPSTS

SEQ ID NO: 4011 - protein, 21 aa, synthetic construct
  REGION 1..21: note = TNR1B Linker (20-40)
VSTRSQHTQPTPEPSTAPSTS

SEQ ID NO: 4012 - protein, 20 aa, synthetic construct
  REGION 1..20: note = TNR1B Linker (21-40)
STRSQHTQPTPEPSTAPSTS

SEQ ID NO: 4013 - protein, 19 aa, synthetic construct
  REGION 1..19: note = TNR1B Linker (22-40)
TRSQHTQPTPEPSTAPSTS

SEQ ID NO: 4014 - protein, 18 aa, synthetic construct
  REGION 1..18: note = TNR1B Linker (23-40)
RSQHTQPTPEPSTAPSTS

SEQ ID NO: 4015 - protein, 17 aa, synthetic construct
  REGION 1..17: note = TNR1B Linker (24-40)
SQHTQPTPEPSTAPSTS

SEQ ID NO: 4016 - protein, 16 aa, synthetic construct
  REGION 1..16: note = TNR1B Linker (25-40)
QHTQPTPEPSTAPSTS

SEQ ID NO: 4017 - protein, 15 aa, synthetic construct
  REGION 1..15: note = TNR1B Linker (26-40)
HTQPTPEPSTAPSTS

SEQ ID NO: 4018 - protein, 14 aa, synthetic construct
  REGION 1..14: note = TNR1B Linker (27-40)
TQPTPEPSTAPSTS

SEQ ID NO: 4019 - protein, 13 aa, synthetic construct
  REGION 1..13: note = TNR1B Linker (28-40)
QPTPEPSTAPSTS

SEQ ID NO: 4020 - protein, 12 aa, synthetic construct
  REGION 1..12: note = TNR1B Linker (29-40)
PTPEPSTAPSTS

SEQ ID NO: 4021 - protein, 11 aa, synthetic construct
  REGION 1..11: note = TNR1B Linker (30-40)
TPEPSTAPSTS

SEQ ID NO: 4022 - protein, 10 aa, synthetic construct
  REGION 1..10: note = TNR1B Linker (31-40)
PEPSTAPSTS

SEQ ID NO: 4023 - protein, 9 aa, synthetic construct
  REGION 1..9: note = TNR1B Linker (32-40)
EPSTAPSTS

SEQ ID NO: 4024 - protein, 8 aa, synthetic construct
  REGION 1..8: note = TNR1B Linker (33-40)
PSTAPSTS

SEQ ID NO: 4025 - protein, 7 aa, synthetic construct
  REGION 1..7: note = TNR1B Linker (34-40)
STAPSTS

SEQ ID NO: 4026 - protein, 6 aa, synthetic construct
  REGION 1..6: note = TNR1B Linker (35-40)
TAPSTS

SEQ ID NO: 4027 - protein, 5 aa, synthetic construct
  REGION 1..5: note = TNR1B Linker (36-40)
APSTS

SEQ ID NO: 4028 - protein, 39 aa, synthetic construct
  REGION 1..39: note = TNR1B Linker (1-39)
TSTSPTRSMAPGAVHLPQPVSTRSQHTQPTPEPSTAPST

SEQ ID NO: 4029 - protein, 38 aa, synthetic construct
  REGION 1..38: note = TNR1B Linker (2-39)
STSPTRSMAPGAVHLPQPVSTRSQHTQPTPEPSTAPST

SEQ ID NO: 4030 - protein, 37 aa, synthetic construct
  REGION 1..37: note = TNR1B Linker (3-39)
TSPTRSMAPGAVHLPQPVSTRSQHTQPTPEPSTAPST

SEQ ID NO: 4031 - protein, 36 aa, synthetic construct
  REGION 1..36: note = TNR1B Linker (4-39)
SPTRSMAPGAVHLPQPVSTRSQHTQPTPEPSTAPST

SEQ ID NO: 4032 - protein, 35 aa, synthetic construct
  REGION 1..35: note = TNR1B Linker (5-39)
PTRSMAPGAVHLPQPVSTRSQHTQPTPEPSTAPST

SEQ ID NO: 4033 - protein, 34 aa, synthetic construct
  REGION 1..34: note = TNR1B Linker (6-39)
TRSMAPGAVHLPQPVSTRSQHTQPTPEPSTAPST

SEQ ID NO: 4034 - protein, 33 aa, synthetic construct
  REGION 1..33: note = TNR1B Linker (7-39)
RSMAPGAVHLPQPVSTRSQHTQPTPEPSTAPST

SEQ ID NO: 4035 - protein, 32 aa, synthetic construct
  REGION 1..32: note = TNR1B Linker (8-39)
SMAPGAVHLPQPVSTRSQHTQPTPEPSTAPST

SEQ ID NO: 4036 - protein, 31 aa, synthetic construct
  REGION 1..31: note = TNR1B Linker (9-39)
MAPGAVHLPQPVSTRSQHTQPTPEPSTAPST

SEQ ID NO: 4037 - protein, 30 aa, synthetic construct
  REGION 1..30: note = TNR1B Linker (10-39)
APGAVHLPQPVSTRSQHTQPTPEPSTAPST

SEQ ID NO: 4038 - protein, 29 aa, synthetic construct
  REGION 1..29: note = TNR1B Linker (11-39)
PGAVHLPQPVSTRSQHTQPTPEPSTAPST

SEQ ID NO: 4039 - protein, 28 aa, synthetic construct
  REGION 1..28: note = TNR1B Linker (12-39)
GAVHLPQPVSTRSQHTQPTPEPSTAPST

SEQ ID NO: 4040 - protein, 27 aa, synthetic construct
  REGION 1..27: note = TNR1B Linker (13-39)
AVHLPQPVSTRSQHTQPTPEPSTAPST

SEQ ID NO: 4041 - protein, 26 aa, synthetic construct
  REGION 1..26: note = TNR1B Linker (14-39)
VHLPQPVSTRSQHTQPTPEPSTAPST

SEQ ID NO: 4042 - protein, 25 aa, synthetic construct
  REGION 1..25: note = TNR1B Linker (15-39)
HLPQPVSTRSQHTQPTPEPSTAPST

SEQ ID NO: 4043 - protein, 24 aa, synthetic construct
  REGION 1..24: note = TNR1B Linker (16-39)
LPQPVSTRSQHTQPTPEPSTAPST

SEQ ID NO: 4044 - protein, 23 aa, synthetic construct
  REGION 1..23: note = TNR1B Linker (17-39)
PQPVSTRSQHTQPTPEPSTAPST

SEQ ID NO: 4045 - protein, 22 aa, synthetic construct
  REGION 1..22: note = TNR1B Linker (18-39)
QPVSTRSQHTQPTPEPSTAPST

SEQ ID NO: 4046 - protein, 21 aa, synthetic construct
  REGION 1..21: note = TNR1B Linker (19-39)
PVSTRSQHTQPTPEPSTAPST

SEQ ID NO: 4047 - protein, 20 aa, synthetic construct
  REGION 1..20: note = TNR1B Linker (20-39)
VSTRSQHTQPTPEPSTAPST

SEQ ID NO: 4048 - protein, 19 aa, synthetic construct
  REGION 1..19: note = TNR1B Linker (21-39)
STRSQHTQPTPEPSTAPST

SEQ ID NO: 4049 - protein, 18 aa, synthetic construct
  REGION 1..18: note = TNR1B Linker (22-39)
TRSQHTQPTPEPSTAPST

SEQ ID NO: 4050 - protein, 17 aa, synthetic construct
  REGION 1..17: note = TNR1B Linker (23-39)
RSQHTQPTPEPSTAPST

SEQ ID NO: 4051 - protein, 16 aa, synthetic construct
  REGION 1..16: note = TNR1B Linker (24-39)
SQHTQPTPEPSTAPST

SEQ ID NO: 4052 - protein, 15 aa, synthetic construct
  REGION 1..15: note = TNR1B Linker (25-39)
QHTQPTPEPSTAPST

SEQ ID NO: 4053 - protein, 14 aa, synthetic construct
  REGION 1..14: note = TNR1B Linker (26-39)
HTQPTPEPSTAPST

SEQ ID NO: 4054 - protein, 13 aa, synthetic construct
  REGION 1..13: note = TNR1B Linker (27-39)
TQPTPEPSTAPST

SEQ ID NO: 4055 - protein, 12 aa, synthetic construct
  REGION 1..12: note = TNR1B Linker (28-39)
QPTPEPSTAPST

SEQ ID NO: 4056 - protein, 11 aa, synthetic construct
  REGION 1..11: note = TNR1B Linker (29-39)
PTPEPSTAPST

SEQ ID NO: 4057 - protein, 10 aa, synthetic construct
  REGION 1..10: note = TNR1B Linker (30-39)
TPEPSTAPST

SEQ ID NO: 4058 - protein, 9 aa, synthetic construct
  REGION 1..9: note = TNR1B Linker (31-39)
PEPSTAPST

SEQ ID NO: 4059 - protein, 8 aa, synthetic construct
  REGION 1..8: note = TNR1B Linker (32-39)
EPSTAPST

SEQ ID NO: 4060 - protein, 7 aa, synthetic construct
  REGION 1..7: note = TNR1B Linker (33-39)
PSTAPST

SEQ ID NO: 4061 - protein, 6 aa, synthetic construct
  REGION 1..6: note = TNR1B Linker (34-39)
STAPST

SEQ ID NO: 4062 - protein, 5 aa, synthetic construct
  REGION 1..5: note = TNR1B Linker (35-39)
TAPST

SEQ ID NO: 4063 - protein, 38 aa, synthetic construct
  REGION 1..38: note = TNR1B Linker (1-38)
TSTSPTRSMAPGAVHLPQPVSTRSQHTQPTPEPSTAPS

SEQ ID NO: 4064 - protein, 37 aa, synthetic construct
  REGION 1..37: note = TNR1B Linker (2-38)
STSPTRSMAPGAVHLPQPVSTRSQHTQPTPEPSTAPS

SEQ ID NO: 4065 - protein, 36 aa, synthetic construct
  REGION 1..36: note = TNR1B Linker (3-38)
TSPTRSMAPGAVHLPQPVSTRSQHTQPTPEPSTAPS

SEQ ID NO: 4066 - protein, 35 aa, synthetic construct
  REGION 1..35: note = TNR1B Linker (4-38)
SPTRSMAPGAVHLPQPVSTRSQHTQPTPEPSTAPS

SEQ ID NO: 4067 - protein, 34 aa, synthetic construct
  REGION 1..34: note = TNR1B Linker (5-38)
PTRSMAPGAVHLPQPVSTRSQHTQPTPEPSTAPS

SEQ ID NO: 4068 - protein, 33 aa, synthetic construct
  REGION 1..33: note = TNR1B Linker (6-38)
TRSMAPGAVHLPQPVSTRSQHTQPTPEPSTAPS

SEQ ID NO: 4069 - protein, 32 aa, synthetic construct
  REGION 1..32: note = TNR1B Linker (7-38)
RSMAPGAVHLPQPVSTRSQHTQPTPEPSTAPS

SEQ ID NO: 4070 - protein, 31 aa, synthetic construct
  REGION 1..31: note = TNR1B Linker (8-38)
SMAPGAVHLPQPVSTRSQHTQPTPEPSTAPS

SEQ ID NO: 4071 - protein, 30 aa, synthetic construct
  REGION 1..30: note = TNR1B Linker (9-38)
MAPGAVHLPQPVSTRSQHTQPTPEPSTAPS

SEQ ID NO: 4072 - protein, 29 aa, synthetic construct
  REGION 1..29: note = TNR1B Linker (10-38)
APGAVHLPQPVSTRSQHTQPTPEPSTAPS

SEQ ID NO: 4073 - protein, 28 aa, synthetic construct
  REGION 1..28: note = TNR1B Linker (11-38)
PGAVHLPQPVSTRSQHTQPTPEPSTAPS

SEQ ID NO: 4074 - protein, 27 aa, synthetic construct
  REGION 1..27: note = TNR1B Linker (12-38)
GAVHLPQPVSTRSQHTQPTPEPSTAPS

SEQ ID NO: 4075 - protein, 26 aa, synthetic construct
  REGION 1..26: note = TNR1B Linker (13-38)
AVHLPQPVSTRSQHTQPTPEPSTAPS

SEQ ID NO: 4076 - protein, 25 aa, synthetic construct
  REGION 1..25: note = TNR1B Linker (14-38)
VHLPQPVSTRSQHTQPTPEPSTAPS

SEQ ID NO: 4077 - protein, 24 aa, synthetic construct
  REGION 1..24: note = TNR1B Linker (15-38)
HLPQPVSTRSQHTQPTPEPSTAPS

SEQ ID NO: 4078 - protein, 23 aa, synthetic construct
  REGION 1..23: note = TNR1B Linker (16-38)
LPQPVSTRSQHTQPTPEPSTAPS

SEQ ID NO: 4079 - protein, 22 aa, synthetic construct
  REGION 1..22: note = TNR1B Linker (17-38)
PQPVSTRSQHTQPTPEPSTAPS

SEQ ID NO: 4080 - protein, 21 aa, synthetic construct
  REGION 1..21: note = TNR1B Linker (18-38)
QPVSTRSQHTQPTPEPSTAPS

SEQ ID NO: 4081 - protein, 20 aa, synthetic construct
  REGION 1..20: note = TNR1B Linker (19-38)
PVSTRSQHTQPTPEPSTAPS

SEQ ID NO: 4082 - protein, 19 aa, synthetic construct
  REGION 1..19: note = TNR1B Linker (20-38)
VSTRSQHTQPTPEPSTAPS

SEQ ID NO: 4083 - protein, 18 aa, synthetic construct
  REGION 1..18: note = TNR1B Linker (21-38)
STRSQHTQPTPEPSTAPS

SEQ ID NO: 4084 - protein, 17 aa, synthetic construct
  REGION 1..17: note = TNR1B Linker (22-38)
TRSQHTQPTPEPSTAPS

SEQ ID NO: 4085 - protein, 16 aa, synthetic construct
  REGION 1..16: note = TNR1B Linker (23-38)
RSQHTQPTPEPSTAPS

SEQ ID NO: 4086 - protein, 15 aa, synthetic construct
  REGION 1..15: note = TNR1B Linker (24-38)
SQHTQPTPEPSTAPS

SEQ ID NO: 4087 - protein, 14 aa, synthetic construct
  REGION 1..14: note = TNR1B Linker (25-38)
QHTQPTPEPSTAPS

SEQ ID NO: 4088 - protein, 13 aa, synthetic construct
  REGION 1..13: note = TNR1B Linker (26-38)
HTQPTPEPSTAPS

SEQ ID NO: 4089 - protein, 12 aa, synthetic construct
  REGION 1..12: note = TNR1B Linker (27-38)
TQPTPEPSTAPS

SEQ ID NO: 4090 - protein, 11 aa, synthetic construct
  REGION 1..11: note = TNR1B Linker (28-38)
QPTPEPSTAPS

SEQ ID NO: 4091 - protein, 10 aa, synthetic construct
  REGION 1..10: note = TNR1B Linker (29-38)
PTPEPSTAPS

SEQ ID NO: 4092 - protein, 9 aa, synthetic construct
  REGION 1..9: note = TNR1B Linker (30-38)
TPEPSTAPS

SEQ ID NO: 4093 - protein, 8 aa, synthetic construct
  REGION 1..8: note = TNR1B Linker (31-38)
PEPSTAPS

SEQ ID NO: 4094 - protein, 7 aa, synthetic construct
  REGION 1..7: note = TNR1B Linker (32-38)
EPSTAPS

SEQ ID NO: 4095 - protein, 6 aa, synthetic construct
  REGION 1..6: note = TNR1B Linker (33-38)
PSTAPS

SEQ ID NO: 4096 - protein, 5 aa, synthetic construct
  REGION 1..5: note = TNR1B Linker (34-38)
STAPS

SEQ ID NO: 4097 - protein, 37 aa, synthetic construct
  REGION 1..37: note = TNR1B Linker (1-37)
TSTSPTRSMAPGAVHLPQPVSTRSQHTQPTPEPSTAP

SEQ ID NO: 4098 - protein, 36 aa, synthetic construct
  REGION 1..36: note = TNR1B Linker (2-37)
STSPTRSMAPGAVHLPQPVSTRSQHTQPTPEPSTAP

SEQ ID NO: 4099 - protein, 35 aa, synthetic construct
  REGION 1..35: note = TNR1B Linker (3-37)
TSPTRSMAPGAVHLPQPVSTRSQHTQPTPEPSTAP

SEQ ID NO: 4100 - protein, 34 aa, synthetic construct
  REGION 1..34: note = TNR1B Linker (4-37)
SPTRSMAPGAVHLPQPVSTRSQHTQPTPEPSTAP

SEQ ID NO: 4101 - protein, 33 aa, synthetic construct
  REGION 1..33: note = TNR1B Linker (5-37)
PTRSMAPGAVHLPQPVSTRSQHTQPTPEPSTAP

SEQ ID NO: 4102 - protein, 32 aa, synthetic construct
  REGION 1..32: note = TNR1B Linker (6-37)
TRSMAPGAVHLPQPVSTRSQHTQPTPEPSTAP

SEQ ID NO: 4103 - protein, 31 aa, synthetic construct
  REGION 1..31: note = TNR1B Linker (7-37)
RSMAPGAVHLPQPVSTRSQHTQPTPEPSTAP

SEQ ID NO: 4104 - protein, 30 aa, synthetic construct
  REGION 1..30: note = TNR1B Linker (8-37)
SMAPGAVHLPQPVSTRSQHTQPTPEPSTAP

SEQ ID NO: 4105 - protein, 29 aa, synthetic construct
  REGION 1..29: note = TNR1B Linker (9-37)
MAPGAVHLPQPVSTRSQHTQPTPEPSTAP

SEQ ID NO: 4106 - protein, 28 aa, synthetic construct
  REGION 1..28: note = TNR1B Linker (10-37)
APGAVHLPQPVSTRSQHTQPTPEPSTAP

SEQ ID NO: 4107 - protein, 27 aa, synthetic construct
  REGION 1..27: note = TNR1B Linker (11-37)
PGAVHLPQPVSTRSQHTQPTPEPSTAP

SEQ ID NO: 4108 - protein, 26 aa, synthetic construct
  REGION 1..26: note = TNR1B Linker (12-37)
GAVHLPQPVSTRSQHTQPTPEPSTAP

SEQ ID NO: 4109 - protein, 25 aa, synthetic construct
  REGION 1..25: note = TNR1B Linker (13-37)
AVHLPQPVSTRSQHTQPTPEPSTAP

SEQ ID NO: 4110 - protein, 24 aa, synthetic construct
  REGION 1..24: note = TNR1B Linker (14-37)
VHLPQPVSTRSQHTQPTPEPSTAP

SEQ ID NO: 4111 - protein, 23 aa, synthetic construct
  REGION 1..23: note = TNR1B Linker (15-37)
HLPQPVSTRSQHTQPTPEPSTAP

SEQ ID NO: 4112 - protein, 22 aa, synthetic construct
  REGION 1..22: note = TNR1B Linker (16-37)
LPQPVSTRSQHTQPTPEPSTAP

SEQ ID NO: 4113 - protein, 21 aa, synthetic construct
  REGION 1..21: note = TNR1B Linker (17-37)
PQPVSTRSQHTQPTPEPSTAP

SEQ ID NO: 4114 - protein, 20 aa, synthetic construct
  REGION 1..20: note = TNR1B Linker (18-37)
QPVSTRSQHTQPTPEPSTAP

SEQ ID NO: 4115 - protein, 19 aa, synthetic construct
  REGION 1..19: note = TNR1B Linker (19-37)
PVSTRSQHTQPTPEPSTAP

SEQ ID NO: 4116 - protein, 18 aa, synthetic construct
  REGION 1..18: note = TNR1B Linker (20-37)
VSTRSQHTQPTPEPSTAP

SEQ ID NO: 4117 - protein, 17 aa, synthetic construct
  REGION 1..17: note = TNR1B Linker (21-37)
STRSQHTQPTPEPSTAP

SEQ ID NO: 4118 - protein, 16 aa, synthetic construct
  REGION 1..16: note = TNR1B Linker (22-37)
TRSQHTQPTPEPSTAP

SEQ ID NO: 4119 - protein, 15 aa, synthetic construct
  REGION 1..15: note = TNR1B Linker (23-37)
RSQHTQPTPEPSTAP

SEQ ID NO: 4120 - protein, 14 aa, synthetic construct
  REGION 1..14: note = TNR1B Linker (24-37)
SQHTQPTPEPSTAP

SEQ ID NO: 4121 - protein, 13 aa, synthetic construct
  REGION 1..13: note = TNR1B Linker (25-37)
QHTQPTPEPSTAP

SEQ ID NO: 4122 - protein, 12 aa, synthetic construct
  REGION 1..12: note = TNR1B Linker (26-37)
HTQPTPEPSTAP

SEQ ID NO: 4123 - protein, 11 aa, synthetic construct
  REGION 1..11: note = TNR1B Linker (27-37)
TQPTPEPSTAP

SEQ ID NO: 4124 - protein, 10 aa, synthetic construct
  REGION 1..10: note = TNR1B Linker (28-37)
QPTPEPSTAP

SEQ ID NO: 4125 - protein, 9 aa, synthetic construct
  REGION 1..9: note = TNR1B Linker (29-37)
PTPEPSTAP

SEQ ID NO: 4126 - protein, 8 aa, synthetic construct
  REGION 1..8: note = TNR1B Linker (30-37)
TPEPSTAP

SEQ ID NO: 4127 - protein, 7 aa, synthetic construct
  REGION 1..7: note = TNR1B Linker (31-37)
PEPSTAP

SEQ ID NO: 4128 - protein, 6 aa, synthetic construct
  REGION 1..6: note = TNR1B Linker (32-37)
EPSTAP

SEQ ID NO: 4129 - protein, 5 aa, synthetic construct
  REGION 1..5: note = TNR1B Linker (33-37)
PSTAP

SEQ ID NO: 4130 - protein, 36 aa, synthetic construct
  REGION 1..36: note = TNR1B Linker (1-36)
TSTSPTRSMAPGAVHLPQPVSTRSQHTQPTPEPSTA

SEQ ID NO: 4131 - protein, 35 aa, synthetic construct
  REGION 1..35: note = TNR1B Linker (2-36)
STSPTRSMAPGAVHLPQPVSTRSQHTQPTPEPSTA

SEQ ID NO: 4132 - protein, 34 aa, synthetic construct
  REGION 1..34: note = TNR1B Linker (3-36)
TSPTRSMAPGAVHLPQPVSTRSQHTQPTPEPSTA

SEQ ID NO: 4133 - protein, 33 aa, synthetic construct
  REGION 1..33: note = TNR1B Linker (4-36)
SPTRSMAPGAVHLPQPVSTRSQHTQPTPEPSTA

SEQ ID NO: 4134 - protein, 32 aa, synthetic construct
  REGION 1..32: note = TNR1B Linker (5-36)
PTRSMAPGAVHLPQPVSTRSQHTQPTPEPSTA

SEQ ID NO: 4135 - protein, 31 aa, synthetic construct
  REGION 1..31: note = TNR1B Linker (6-36)
TRSMAPGAVHLPQPVSTRSQHTQPTPEPSTA

SEQ ID NO: 4136 - protein, 30 aa, synthetic construct
  REGION 1..30: note = TNR1B Linker (7-36)
RSMAPGAVHLPQPVSTRSQHTQPTPEPSTA

SEQ ID NO: 4137 - protein, 29 aa, synthetic construct
  REGION 1..29: note = TNR1B Linker (8-36)
SMAPGAVHLPQPVSTRSQHTQPTPEPSTA

SEQ ID NO: 4138 - protein, 28 aa, synthetic construct
  REGION 1..28: note = TNR1B Linker (9-36)
MAPGAVHLPQPVSTRSQHTQPTPEPSTA

SEQ ID NO: 4139 - protein, 27 aa, synthetic construct
  REGION 1..27: note = TNR1B Linker (10-36)
APGAVHLPQPVSTRSQHTQPTPEPSTA

SEQ ID NO: 4140 - protein, 26 aa, synthetic construct
  REGION 1..26: note = TNR1B Linker (11-36)
PGAVHLPQPVSTRSQHTQPTPEPSTA

SEQ ID NO: 4141 - protein, 25 aa, synthetic construct
  REGION 1..25: note = TNR1B Linker (12-36)
GAVHLPQPVSTRSQHTQPTPEPSTA

SEQ ID NO: 4142 - protein, 24 aa, synthetic construct
  REGION 1..24: note = TNR1B Linker (13-36)
AVHLPQPVSTRSQHTQPTPEPSTA

SEQ ID NO: 4143 - protein, 23 aa, synthetic construct
  REGION 1..23: note = TNR1B Linker (14-36)
VHLPQPVSTRSQHTQPTPEPSTA

SEQ ID NO: 4144 - protein, 22 aa, synthetic construct
  REGION 1..22: note = TNR1B Linker (15-36)
HLPQPVSTRSQHTQPTPEPSTA

SEQ ID NO: 4145 - protein, 21 aa, synthetic construct
  REGION 1..21: note = TNR1B Linker (16-36)
LPQPVSTRSQHTQPTPEPSTA

SEQ ID NO: 4146 - protein, 20 aa, synthetic construct
  REGION 1..20: note = TNR1B Linker (17-36)
PQPVSTRSQHTQPTPEPSTA

SEQ ID NO: 4147 - protein, 19 aa, synthetic construct
  REGION 1..19: note = TNR1B Linker (18-36)
QPVSTRSQHTQPTPEPSTA

SEQ ID NO: 4148 - protein, 18 aa, synthetic construct
  REGION 1..18: note = TNR1B Linker (19-36)
PVSTRSQHTQPTPEPSTA

SEQ ID NO: 4149 - protein, 17 aa, synthetic construct
  REGION 1..17: note = TNR1B Linker (20-36)
VSTRSQHTQPTPEPSTA

SEQ ID NO: 4150 - protein, 16 aa, synthetic construct
  REGION 1..16: note = TNR1B Linker (21-36)
STRSQHTQPTPEPSTA

SEQ ID NO: 4151 - protein, 15 aa, synthetic construct
  REGION 1..15: note = TNR1B Linker (22-36)
TRSQHTQPTPEPSTA

SEQ ID NO: 4152 - protein, 14 aa, synthetic construct
  REGION 1..14: note = TNR1B Linker (23-36)
RSQHTQPTPEPSTA

SEQ ID NO: 4153 - protein, 13 aa, synthetic construct
  REGION 1..13: note = TNR1B Linker (24-36)
SQHTQPTPEPSTA

SEQ ID NO: 4154 - protein, 12 aa, synthetic construct
  REGION 1..12: note = TNR1B Linker (25-36)
QHTQPTPEPSTA

SEQ ID NO: 4155 - protein, 11 aa, synthetic construct
  REGION 1..11: note = TNR1B Linker (26-36)
HTQPTPEPSTA

SEQ ID NO: 4156 - protein, 10 aa, synthetic construct
  REGION 1..10: note = TNR1B Linker (27-36)
TQPTPEPSTA

SEQ ID NO: 4157 - protein, 9 aa, synthetic construct
  REGION 1..9: note = TNR1B Linker (28-36)
QPTPEPSTA

SEQ ID NO: 4158 - protein, 8 aa, synthetic construct
  REGION 1..8: note = TNR1B Linker (29-36)
PTPEPSTA

SEQ ID NO: 4159 - protein, 7 aa, synthetic construct
  REGION 1..7: note = TNR1B Linker (30-36)
TPEPSTA

SEQ ID NO: 4160 - protein, 6 aa, synthetic construct
  REGION 1..6: note = TNR1B Linker (31-36)
PEPSTA

SEQ ID NO: 4161 - protein, 5 aa, synthetic construct
  REGION 1..5: note = TNR1B Linker (32-36)
EPSTA

SEQ ID NO: 4162 - protein, 35 aa, synthetic construct
  REGION 1..35: note = TNR1B Linker (1-35)
TSTSPTRSMAPGAVHLPQPVSTRSQHTQPTPEPST

SEQ ID NO: 4163 - protein, 34 aa, synthetic construct
  REGION 1..34: note = TNR1B Linker (2-35)
STSPTRSMAPGAVHLPQPVSTRSQHTQPTPEPST

SEQ ID NO: 4164 - protein, 33 aa, synthetic construct
  REGION 1..33: note = TNR1B Linker (3-35)
TSPTRSMAPGAVHLPQPVSTRSQHTQPTPEPST

SEQ ID NO: 4165 - protein, 32 aa, synthetic construct
  REGION 1..32: note = TNR1B Linker (4-35)
SPTRSMAPGAVHLPQPVSTRSQHTQPTPEPST

SEQ ID NO: 4166 - protein, 31 aa, synthetic construct
  REGION 1..31: note = TNR1B Linker (5-35)
PTRSMAPGAVHLPQPVSTRSQHTQPTPEPST

SEQ ID NO: 4167 - protein, 30 aa, synthetic construct
  REGION 1..30: note = TNR1B Linker (6-35)
TRSMAPGAVHLPQPVSTRSQHTQPTPEPST

SEQ ID NO: 4168 - protein, 29 aa, synthetic construct
  REGION 1..29: note = TNR1B Linker (7-35)
RSMAPGAVHLPQPVSTRSQHTQPTPEPST

SEQ ID NO: 4169 - protein, 28 aa, synthetic construct
  REGION 1..28: note = TNR1B Linker (8-35)
SMAPGAVHLPQPVSTRSQHTQPTPEPST

SEQ ID NO: 4170 - protein, 27 aa, synthetic construct
  REGION 1..27: note = TNR1B Linker (9-35)
MAPGAVHLPQPVSTRSQHTQPTPEPST

SEQ ID NO: 4171 - protein, 26 aa, synthetic construct
  REGION 1..26: note = TNR1B Linker (10-35)
APGAVHLPQPVSTRSQHTQPTPEPST

SEQ ID NO: 4172 - protein, 25 aa, synthetic construct
  REGION 1..25: note = TNR1B Linker (11-35)
PGAVHLPQPVSTRSQHTQPTPEPST

SEQ ID NO: 4173 - protein, 24 aa, synthetic construct
  REGION 1..24: note = TNR1B Linker (12-35)
GAVHLPQPVSTRSQHTQPTPEPST

SEQ ID NO: 4174 - protein, 23 aa, synthetic construct
  REGION 1..23: note = TNR1B Linker (13-35)
AVHLPQPVSTRSQHTQPTPEPST

SEQ ID NO: 4175 - protein, 22 aa, synthetic construct
  REGION 1..22: note = TNR1B Linker (14-35)
VHLPQPVSTRSQHTQPTPEPST

SEQ ID NO: 4176 - protein, 21 aa, synthetic construct
  REGION 1..21: note = TNR1B Linker (15-35)
HLPQPVSTRSQHTQPTPEPST

SEQ ID NO: 4177 - protein, 20 aa, synthetic construct
  REGION 1..20: note = TNR1B Linker (16-35)
LPQPVSTRSQHTQPTPEPST

SEQ ID NO: 4178 - protein, 19 aa, synthetic construct
  REGION 1..19: note = TNR1B Linker (17-35)
PQPVSTRSQHTQPTPEPST

SEQ ID NO: 4179 - protein, 18 aa, synthetic construct
  REGION 1..18: note = TNR1B Linker (18-35)
QPVSTRSQHTQPTPEPST

SEQ ID NO: 4180 - protein, 17 aa, synthetic construct
  REGION 1..17: note = TNR1B Linker (19-35)
PVSTRSQHTQPTPEPST

SEQ ID NO: 4181 - protein, 16 aa, synthetic construct
  REGION 1..16: note = TNR1B Linker (20-35)
VSTRSQHTQPTPEPST

SEQ ID NO: 4182 - protein, 15 aa, synthetic construct
  REGION 1..15: note = TNR1B Linker (21-35)
STRSQHTQPTPEPST

SEQ ID NO: 4183 - protein, 14 aa, synthetic construct
  REGION 1..14: note = TNR1B Linker (22-35)
TRSQHTQPTPEPST

SEQ ID NO: 4184 - protein, 13 aa, synthetic construct
  REGION 1..13: note = TNR1B Linker (23-35)
RSQHTQPTPEPST

SEQ ID NO: 4185 - protein, 12 aa, synthetic construct
  REGION 1..12: note = TNR1B Linker (24-35)
SQHTQPTPEPST

SEQ ID NO: 4186 - protein, 11 aa, synthetic construct
  REGION 1..11: note = TNR1B Linker (25-35)
QHTQPTPEPST

SEQ ID NO: 4187 - protein, 10 aa, synthetic construct
  REGION 1..10: note = TNR1B Linker (26-35)
HTQPTPEPST

SEQ ID NO: 4188 - protein, 9 aa, synthetic construct
  REGION 1..9: note = TNR1B Linker (27-35)
TQPTPEPST

SEQ ID NO: 4189 - protein, 8 aa, synthetic construct
  REGION 1..8: note = TNR1B Linker (28-35)
QPTPEPST

SEQ ID NO: 4190 - protein, 7 aa, synthetic construct
  REGION 1..7: note = TNR1B Linker (29-35)
PTPEPST

SEQ ID NO: 4191 - protein, 6 aa, synthetic construct
  REGION 1..6: note = TNR1B Linker (30-35)
TPEPST

SEQ ID NO: 4192 - protein, 5 aa, synthetic construct
  REGION 1..5: note = TNR1B Linker (31-35)
PEPST

SEQ ID NO: 4193 - protein, 34 aa, synthetic construct
  REGION 1..34: note = TNR1B Linker (1-34)
TSTSPTRSMAPGAVHLPQPVSTRSQHTQPTPEPS

SEQ ID NO: 4194 - protein, 33 aa, synthetic construct
  REGION 1..33: note = TNR1B Linker (2-34)
STSPTRSMAPGAVHLPQPVSTRSQHTQPTPEPS

SEQ ID NO: 4195 - protein, 32 aa, synthetic construct
  REGION 1..32: note = TNR1B Linker (3-34)
TSPTRSMAPGAVHLPQPVSTRSQHTQPTPEPS

SEQ ID NO: 4196 - protein, 31 aa, synthetic construct
  REGION 1..31: note = TNR1B Linker (4-34)
SPTRSMAPGAVHLPQPVSTRSQHTQPTPEPS

SEQ ID NO: 4197 - protein, 30 aa, synthetic construct
  REGION 1..30: note = TNR1B Linker (5-34)
PTRSMAPGAVHLPQPVSTRSQHTQPTPEPS

SEQ ID NO: 4198 - protein, 29 aa, synthetic construct
  REGION 1..29: note = TNR1B Linker (6-34)
TRSMAPGAVHLPQPVSTRSQHTQPTPEPS

SEQ ID NO: 4199 - protein, 28 aa, synthetic construct
  REGION 1..28: note = TNR1B Linker (7-34)
RSMAPGAVHLPQPVSTRSQHTQPTPEPS

SEQ ID NO: 4200 - protein, 27 aa, synthetic construct
  REGION 1..27: note = TNR1B Linker (8-34)
SMAPGAVHLPQPVSTRSQHTQPTPEPS

SEQ ID NO: 4201 - protein, 26 aa, synthetic construct
  REGION 1..26: note = TNR1B Linker (9-34)
MAPGAVHLPQPVSTRSQHTQPTPEPS

SEQ ID NO: 4202 - protein, 25 aa, synthetic construct
  REGION 1..25: note = TNR1B Linker (10-34)
APGAVHLPQPVSTRSQHTQPTPEPS

SEQ ID NO: 4203 - protein, 24 aa, synthetic construct
  REGION 1..24: note = TNR1B Linker (11-34)
PGAVHLPQPVSTRSQHTQPTPEPS

SEQ ID NO: 4204 - protein, 23 aa, synthetic construct
  REGION 1..23: note = TNR1B Linker (12-34)
GAVHLPQPVSTRSQHTQPTPEPS

SEQ ID NO: 4205 - protein, 22 aa, synthetic construct
  REGION 1..22: note = TNR1B Linker (13-34)
AVHLPQPVSTRSQHTQPTPEPS

SEQ ID NO: 4206 - protein, 21 aa, synthetic construct
  REGION 1..21: note = TNR1B Linker (14-34)
VHLPQPVSTRSQHTQPTPEPS

SEQ ID NO: 4207 - protein, 20 aa, synthetic construct
  REGION 1..20: note = TNR1B Linker (15-34)
HLPQPVSTRSQHTQPTPEPS

SEQ ID NO: 4208 - protein, 19 aa, synthetic construct
  REGION 1..19: note = TNR1B Linker (16-34)
LPQPVSTRSQHTQPTPEPS

SEQ ID NO: 4209 - protein, 18 aa, synthetic construct
  REGION 1..18: note = TNR1B Linker (17-34)
PQPVSTRSQHTQPTPEPS

SEQ ID NO: 4210 - protein, 17 aa, synthetic construct
  REGION 1..17: note = TNR1B Linker (18-34)
QPVSTRSQHTQPTPEPS

SEQ ID NO: 4211 - protein, 16 aa, synthetic construct
  REGION 1..16: note = TNR1B Linker (19-34)
PVSTRSQHTQPTPEPS

SEQ ID NO: 4212 - protein, 15 aa, synthetic construct
  REGION 1..15: note = TNR1B Linker (20-34)
VSTRSQHTQPTPEPS

SEQ ID NO: 4213 - protein, 14 aa, synthetic construct
  REGION 1..14: note = TNR1B Linker (21-34)
STRSQHTQPTPEPS

SEQ ID NO: 4214 - protein, 13 aa, synthetic construct
  REGION 1..13: note = TNR1B Linker (22-34)
TRSQHTQPTPEPS

SEQ ID NO: 4215 - protein, 12 aa, synthetic construct
  REGION 1..12: note = TNR1B Linker (23-34)
RSQHTQPTPEPS

SEQ ID NO: 4216 - protein, 11 aa, synthetic construct
  REGION 1..11: note = TNR1B Linker (24-34)
SQHTQPTPEPS

SEQ ID NO: 4217 - protein, 10 aa, synthetic construct
  REGION 1..10: note = TNR1B Linker (25-34)
QHTQPTPEPS

SEQ ID NO: 4218 - protein, 9 aa, synthetic construct
  REGION 1..9: note = TNR1B Linker (26-34)
HTQPTPEPS

SEQ ID NO: 4219 - protein, 8 aa, synthetic construct
  REGION 1..8: note = TNR1B Linker (27-34)
TQPTPEPS

SEQ ID NO: 4220 - protein, 7 aa, synthetic construct
  REGION 1..7: note = TNR1B Linker (28-34)
QPTPEPS

SEQ ID NO: 4221 - protein, 6 aa, synthetic construct
  REGION 1..6: note = TNR1B Linker (29-34)
PTPEPS

SEQ ID NO: 4222 - protein, 5 aa, synthetic construct
  REGION 1..5: note = TNR1B Linker (30-34)
TPEPS

SEQ ID NO: 4223 - protein, 33 aa, synthetic construct
  REGION 1..33: note = TNR1B Linker (1-33)
TSTSPTRSMAPGAVHLPQPVSTRSQHTQPTPEP

SEQ ID NO: 4224 - protein, 32 aa, synthetic construct
  REGION 1..32: note = TNR1B Linker (2-33)
STSPTRSMAPGAVHLPQPVSTRSQHTQPTPEP

SEQ ID NO: 4225 - protein, 31 aa, synthetic construct
  REGION 1..31: note = TNR1B Linker (3-33)
TSPTRSMAPGAVHLPQPVSTRSQHTQPTPEP

SEQ ID NO: 4226 - protein, 30 aa, synthetic construct
  REGION 1..30: note = TNR1B Linker (4-33)
SPTRSMAPGAVHLPQPVSTRSQHTQPTPEP

SEQ ID NO: 4227 - protein, 29 aa, synthetic construct
  REGION 1..29: note = TNR1B Linker (5-33)
PTRSMAPGAVHLPQPVSTRSQHTQPTPEP

SEQ ID NO: 4228 - protein, 28 aa, synthetic construct
  REGION 1..28: note = TNR1B Linker (6-33)
TRSMAPGAVHLPQPVSTRSQHTQPTPEP

SEQ ID NO: 4229 - protein, 27 aa, synthetic construct
  REGION 1..27: note = TNR1B Linker (7-33)
RSMAPGAVHLPQPVSTRSQHTQPTPEP

SEQ ID NO: 4230 - protein, 26 aa, synthetic construct
  REGION 1..26: note = TNR1B Linker (8-33)
SMAPGAVHLPQPVSTRSQHTQPTPEP

SEQ ID NO: 4231 - protein, 25 aa, synthetic construct
  REGION 1..25: note = TNR1B Linker (9-33)
MAPGAVHLPQPVSTRSQHTQPTPEP

SEQ ID NO: 4232 - protein, 24 aa, synthetic construct
  REGION 1..24: note = TNR1B Linker (10-33)
APGAVHLPQPVSTRSQHTQPTPEP

SEQ ID NO: 4233 - protein, 23 aa, synthetic construct
  REGION 1..23: note = TNR1B Linker (11-33)
PGAVHLPQPVSTRSQHTQPTPEP

SEQ ID NO: 4234 - protein, 22 aa, synthetic construct
  REGION 1..22: note = TNR1B Linker (12-33)
GAVHLPQPVSTRSQHTQPTPEP

SEQ ID NO: 4235 - protein, 21 aa, synthetic construct
  REGION 1..21: note = TNR1B Linker (13-33)
AVHLPQPVSTRSQHTQPTPEP

SEQ ID NO: 4236 - protein, 20 aa, synthetic construct
  REGION 1..20: note = TNR1B Linker (14-33)
VHLPQPVSTRSQHTQPTPEP

SEQ ID NO: 4237 - protein, 19 aa, synthetic construct
  REGION 1..19: note = TNR1B Linker (15-33)
HLPQPVSTRSQHTQPTPEP

SEQ ID NO: 4238 - protein, 18 aa, synthetic construct
  REGION 1..18: note = TNR1B Linker (16-33)
LPQPVSTRSQHTQPTPEP

SEQ ID NO: 4239 - protein, 17 aa, synthetic construct
  REGION 1..17: note = TNR1B Linker (17-33)
PQPVSTRSQHTQPTPEP

SEQ ID NO: 4240 - protein, 16 aa, synthetic construct
  REGION 1..16: note = TNR1B Linker (18-33)
QPVSTRSQHTQPTPEP

SEQ ID NO: 4241 - protein, 15 aa, synthetic construct
  REGION 1..15: note = TNR1B Linker (19-33)
PVSTRSQHTQPTPEP

SEQ ID NO: 4242 - protein, 14 aa, synthetic construct
  REGION 1..14: note = TNR1B Linker (20-33)
VSTRSQHTQPTPEP

SEQ ID NO: 4243 - protein, 13 aa, synthetic construct
  REGION 1..13: note = TNR1B Linker (21-33)
STRSQHTQPTPEP

SEQ ID NO: 4244 - protein, 12 aa, synthetic construct
  REGION 1..12: note = TNR1B Linker (22-33)
TRSQHTQPTPEP

SEQ ID NO: 4245 - protein, 11 aa, synthetic construct
  REGION 1..11: note = TNR1B Linker (23-33)
RSQHTQPTPEP

SEQ ID NO: 4246 - protein, 10 aa, synthetic construct
  REGION 1..10: note = TNR1B Linker (24-33)
SQHTQPTPEP

SEQ ID NO: 4247 - protein, 9 aa, synthetic construct
  REGION 1..9: note = TNR1B Linker (25-33)
QHTQPTPEP

SEQ ID NO: 4248 - protein, 8 aa, synthetic construct
  REGION 1..8: note = TNR1B Linker (26-33)
HTQPTPEP

SEQ ID NO: 4249 - protein, 7 aa, synthetic construct
  REGION 1..7: note = TNR1B Linker (27-33)
TQPTPEP

SEQ ID NO: 4250 - protein, 6 aa, synthetic construct
  REGION 1..6: note = TNR1B Linker (28-33)
QPTPEP

SEQ ID NO: 4251 - protein, 5 aa, synthetic construct
  REGION 1..5: note = TNR1B Linker (29-33)
PTPEP

SEQ ID NO: 4252 - protein, 32 aa, synthetic construct
  REGION 1..32: note = TNR1B Linker (1-32)
TSTSPTRSMAPGAVHLPQPVSTRSQHTQPTPE

SEQ ID NO: 4253 - protein, 31 aa, synthetic construct
  REGION 1..31: note = TNR1B Linker (2-32)
STSPTRSMAPGAVHLPQPVSTRSQHTQPTPE

SEQ ID NO: 4254 - protein, 30 aa, synthetic construct
  REGION 1..30: note = TNR1B Linker (3-32)
TSPTRSMAPGAVHLPQPVSTRSQHTQPTPE

SEQ ID NO: 4255 - protein, 29 aa, synthetic construct
  REGION 1..29: note = TNR1B Linker (4-32)
SPTRSMAPGAVHLPQPVSTRSQHTQPTPE

SEQ ID NO: 4256 - protein, 28 aa, synthetic construct
  REGION 1..28: note = TNR1B Linker (5-32)
PTRSMAPGAVHLPQPVSTRSQHTQPTPE

SEQ ID NO: 4257 - protein, 27 aa, synthetic construct
  REGION 1..27: note = TNR1B Linker (6-32)
TRSMAPGAVHLPQPVSTRSQHTQPTPE

SEQ ID NO: 4258 - protein, 26 aa, synthetic construct
  REGION 1..26: note = TNR1B Linker (7-32)
RSMAPGAVHLPQPVSTRSQHTQPTPE

SEQ ID NO: 4259 - protein, 25 aa, synthetic construct
  REGION 1..25: note = TNR1B Linker (8-32)
SMAPGAVHLPQPVSTRSQHTQPTPE

SEQ ID NO: 4260 - protein, 24 aa, synthetic construct
  REGION 1..24: note = TNR1B Linker (9-32)
MAPGAVHLPQPVSTRSQHTQPTPE

SEQ ID NO: 4261 - protein, 23 aa, synthetic construct
  REGION 1..23: note = TNR1B Linker (10-32)
APGAVHLPQPVSTRSQHTQPTPE

SEQ ID NO: 4262 - protein, 22 aa, synthetic construct
  REGION 1..22: note = TNR1B Linker (11-32)
PGAVHLPQPVSTRSQHTQPTPE

SEQ ID NO: 4263 - protein, 21 aa, synthetic construct
  REGION 1..21: note = TNR1B Linker (12-32)
GAVHLPQPVSTRSQHTQPTPE

SEQ ID NO: 4264 - protein, 20 aa, synthetic construct
  REGION 1..20: note = TNR1B Linker (13-32)
AVHLPQPVSTRSQHTQPTPE

SEQ ID NO: 4265 - protein, 19 aa, synthetic construct
  REGION 1..19: note = TNR1B Linker (14-32)
VHLPQPVSTRSQHTQPTPE

SEQ ID NO: 4266 - protein, 18 aa, synthetic construct
  REGION 1..18: note = TNR1B Linker (15-32)
HLPQPVSTRSQHTQPTPE

SEQ ID NO: 4267 - protein, 17 aa, synthetic construct
  REGION 1..17: note = TNR1B Linker (16-32)
LPQPVSTRSQHTQPTPE

SEQ ID NO: 4268 - protein, 16 aa, synthetic construct
  REGION 1..16: note = TNR1B Linker (17-32)
PQPVSTRSQHTQPTPE

SEQ ID NO: 4269 - protein, 15 aa, synthetic construct
  REGION 1..15: note = TNR1B Linker (18-32)
QPVSTRSQHTQPTPE

SEQ ID NO: 4270 - protein, 14 aa, synthetic construct
  REGION 1..14: note = TNR1B Linker (19-32)
PVSTRSQHTQPTPE

SEQ ID NO: 4271 - protein, 13 aa, synthetic construct
  REGION 1..13: note = TNR1B Linker (20-32)
VSTRSQHTQPTPE

SEQ ID NO: 4272 - protein, 12 aa, synthetic construct
  REGION 1..12: note = TNR1B Linker (21-32)
STRSQHTQPTPE

SEQ ID NO: 4273 - protein, 11 aa, synthetic construct
  REGION 1..11: note = TNR1B Linker (22-32)
TRSQHTQPTPE

SEQ ID NO: 4274 - protein, 10 aa, synthetic construct
  REGION 1..10: note = TNR1B Linker (23-32)
RSQHTQPTPE

SEQ ID NO: 4275 - protein, 9 aa, synthetic construct
  REGION 1..9: note = TNR1B Linker (24-32)
SQHTQPTPE

SEQ ID NO: 4276 - protein, 8 aa, synthetic construct
  REGION 1..8: note = TNR1B Linker (25-32)
QHTQPTPE

SEQ ID NO: 4277 - protein, 7 aa, synthetic construct
  REGION 1..7: note = TNR1B Linker (26-32)
HTQPTPE

SEQ ID NO: 4278 - protein, 6 aa, synthetic construct
  REGION 1..6: note = TNR1B Linker (27-32)
TQPTPE

SEQ ID NO: 4279 - protein, 5 aa, synthetic construct
  REGION 1..5: note = TNR1B Linker (28-32)
QPTPE

SEQ ID NO: 4280 - protein, 31 aa, synthetic construct
  REGION 1..31: note = TNR1B Linker (1-31)
TSTSPTRSMAPGAVHLPQPVSTRSQHTQPTP

SEQ ID NO: 4281 - protein, 30 aa, synthetic construct
  REGION 1..30: note = TNR1B Linker (2-31)
STSPTRSMAPGAVHLPQPVSTRSQHTQPTP

SEQ ID NO: 4282 - protein, 29 aa, synthetic construct
  REGION 1..29: note = TNR1B Linker (3-31)
TSPTRSMAPGAVHLPQPVSTRSQHTQPTP

SEQ ID NO: 4283 - protein, 28 aa, synthetic construct
  REGION 1..28: note = TNR1B Linker (4-31)
SPTRSMAPGAVHLPQPVSTRSQHTQPTP

SEQ ID NO: 4284 - protein, 27 aa, synthetic construct
  REGION 1..27: note = TNR1B Linker (5-31)
PTRSMAPGAVHLPQPVSTRSQHTQPTP

SEQ ID NO: 4285 - protein, 26 aa, synthetic construct
  REGION 1..26: note = TNR1B Linker (6-31)
TRSMAPGAVHLPQPVSTRSQHTQPTP

SEQ ID NO: 4286 - protein, 25 aa, synthetic construct
  REGION 1..25: note = TNR1B Linker (7-31)
RSMAPGAVHLPQPVSTRSQHTQPTP

SEQ ID NO: 4287 - protein, 24 aa, synthetic construct
  REGION 1..24: note = TNR1B Linker (8-31)
SMAPGAVHLPQPVSTRSQHTQPTP

SEQ ID NO: 4288 - protein, 23 aa, synthetic construct
  REGION 1..23: note = TNR1B Linker (9-31)
MAPGAVHLPQPVSTRSQHTQPTP

SEQ ID NO: 4289 - protein, 22 aa, synthetic construct
  REGION 1..22: note = TNR1B Linker (10-31)
APGAVHLPQPVSTRSQHTQPTP

SEQ ID NO: 4290 - protein, 21 aa, synthetic construct
  REGION 1..21: note = TNR1B Linker (11-31)
PGAVHLPQPVSTRSQHTQPTP

SEQ ID NO: 4291 - protein, 20 aa, synthetic construct
  REGION 1..20: note = TNR1B Linker (12-31)
GAVHLPQPVSTRSQHTQPTP

SEQ ID NO: 4292 - protein, 19 aa, synthetic construct
  REGION 1..19: note = TNR1B Linker (13-31)
AVHLPQPVSTRSQHTQPTP

SEQ ID NO: 4293 - protein, 18 aa, synthetic construct
  REGION 1..18: note = TNR1B Linker (14-31)
VHLPQPVSTRSQHTQPTP

SEQ ID NO: 4294 - protein, 17 aa, synthetic construct
  REGION 1..17: note = TNR1B Linker (15-31)
HLPQPVSTRSQHTQPTP

SEQ ID NO: 4295 - protein, 16 aa, synthetic construct
  REGION 1..16: note = TNR1B Linker (16-31)
LPQPVSTRSQHTQPTP

SEQ ID NO: 4296 - protein, 15 aa, synthetic construct
  REGION 1..15: note = TNR1B Linker (17-31)
PQPVSTRSQHTQPTP

SEQ ID NO: 4297 - protein, 14 aa, synthetic construct
  REGION 1..14: note = TNR1B Linker (18-31)
QPVSTRSQHTQPTP

SEQ ID NO: 4298 - protein, 13 aa, synthetic construct
  REGION 1..13: note = TNR1B Linker (19-31)
PVSTRSQHTQPTP

SEQ ID NO: 4299 - protein, 12 aa, synthetic construct
  REGION 1..12: note = TNR1B Linker (20-31)
VSTRSQHTQPTP

SEQ ID NO: 4300 - protein, 11 aa, synthetic construct
  REGION 1..11: note = TNR1B Linker (21-31)
STRSQHTQPTP

SEQ ID NO: 4301 - protein, 10 aa, synthetic construct
  REGION 1..10: note = TNR1B Linker (22-31)
TRSQHTQPTP

SEQ ID NO: 4302 - protein, 9 aa, synthetic construct
  REGION 1..9: note = TNR1B Linker (23-31)
RSQHTQPTP

SEQ ID NO: 4303 - protein, 8 aa, synthetic construct
  REGION 1..8: note = TNR1B Linker (24-31)
SQHTQPTP

SEQ ID NO: 4304 - protein, 7 aa, synthetic construct
  REGION 1..7: note = TNR1B Linker (25-31)
QHTQPTP

SEQ ID NO: 4305 - protein, 6 aa, synthetic construct
  REGION 1..6: note = TNR1B Linker (26-31)
HTQPTP

SEQ ID NO: 4306 - protein, 5 aa, synthetic construct
  REGION 1..5: note = TNR1B Linker (27-31)
TQPTP

SEQ ID NO: 4307 - protein, 30 aa, synthetic construct
  REGION 1..30: note = TNR1B Linker (1-30)
TSTSPTRSMAPGAVHLPQPVSTRSQHTQPT

SEQ ID NO: 4308 - protein, 29 aa, synthetic construct
  REGION 1..29: note = TNR1B Linker (2-30)
STSPTRSMAPGAVHLPQPVSTRSQHTQPT

SEQ ID NO: 4309 - protein, 28 aa, synthetic construct
  REGION 1..28: note = TNR1B Linker (3-30)
TSPTRSMAPGAVHLPQPVSTRSQHTQPT

SEQ ID NO: 4310 - protein, 27 aa, synthetic construct
  REGION 1..27: note = TNR1B Linker (4-30)
SPTRSMAPGAVHLPQPVSTRSQHTQPT

SEQ ID NO: 4311 - protein, 26 aa, synthetic construct
  REGION 1..26: note = TNR1B Linker (5-30)
PTRSMAPGAVHLPQPVSTRSQHTQPT

SEQ ID NO: 4312 - protein, 25 aa, synthetic construct
  REGION 1..25: note = TNR1B Linker (6-30)
TRSMAPGAVHLPQPVSTRSQHTQPT

SEQ ID NO: 4313 - protein, 24 aa, synthetic construct
  REGION 1..24: note = TNR1B Linker (7-30)
RSMAPGAVHLPQPVSTRSQHTQPT

SEQ ID NO: 4314 - protein, 23 aa, synthetic construct
  REGION 1..23: note = TNR1B Linker (8-30)
SMAPGAVHLPQPVSTRSQHTQPT

SEQ ID NO: 4315 - protein, 22 aa, synthetic construct
  REGION 1..22: note = TNR1B Linker (9-30)
MAPGAVHLPQPVSTRSQHTQPT

SEQ ID NO: 4316 - protein, 21 aa, synthetic construct
  REGION 1..21: note = TNR1B Linker (10-30)
APGAVHLPQPVSTRSQHTQPT

SEQ ID NO: 4317 - protein, 20 aa, synthetic construct
  REGION 1..20: note = TNR1B Linker (11-30)
PGAVHLPQPVSTRSQHTQPT

SEQ ID NO: 4318 - protein, 19 aa, synthetic construct
  REGION 1..19: note = TNR1B Linker (12-30)
GAVHLPQPVSTRSQHTQPT

SEQ ID NO: 4319 - protein, 18 aa, synthetic construct
  REGION 1..18: note = TNR1B Linker (13-30)
AVHLPQPVSTRSQHTQPT

SEQ ID NO: 4320 - protein, 17 aa, synthetic construct
  REGION 1..17: note = TNR1B Linker (14-30)
VHLPQPVSTRSQHTQPT

SEQ ID NO: 4321 - protein, 16 aa, synthetic construct
  REGION 1..16: note = TNR1B Linker (15-30)
HLPQPVSTRSQHTQPT

SEQ ID NO: 4322 - protein, 15 aa, synthetic construct
  REGION 1..15: note = TNR1B Linker (16-30)
LPQPVSTRSQHTQPT

SEQ ID NO: 4323 - protein, 14 aa, synthetic construct
  REGION 1..14: note = TNR1B Linker (17-30)
PQPVSTRSQHTQPT

SEQ ID NO: 4324 - protein, 13 aa, synthetic construct
  REGION 1..13: note = TNR1B Linker (18-30)
QPVSTRSQHTQPT

SEQ ID NO: 4325 - protein, 12 aa, synthetic construct
  REGION 1..12: note = TNR1B Linker (19-30)
PVSTRSQHTQPT

SEQ ID NO: 4326 - protein, 11 aa, synthetic construct
  REGION 1..11: note = TNR1B Linker (20-30)
VSTRSQHTQPT

SEQ ID NO: 4327 - protein, 10 aa, synthetic construct
  REGION 1..10: note = TNR1B Linker (21-30)
STRSQHTQPT

SEQ ID NO: 4328 - protein, 9 aa, synthetic construct
  REGION 1..9: note = TNR1B Linker (22-30)
TRSQHTQPT

SEQ ID NO: 4329 - protein, 8 aa, synthetic construct
  REGION 1..8: note = TNR1B Linker (23-30)
RSQHTQPT

SEQ ID NO: 4330 - protein, 7 aa, synthetic construct
  REGION 1..7: note = TNR1B Linker (24-30)
SQHTQPT

SEQ ID NO: 4331 - protein, 6 aa, synthetic construct
  REGION 1..6: note = TNR1B Linker (25-30)
QHTQPT

SEQ ID NO: 4332 - protein, 5 aa, synthetic construct
  REGION 1..5: note = TNR1B Linker (26-30)
HTQPT

SEQ ID NO: 4333 - protein, 29 aa, synthetic construct
  REGION 1..29: note = TNR1B Linker (1-29)
TSTSPTRSMAPGAVHLPQPVSTRSQHTQP

SEQ ID NO: 4334 - protein, 28 aa, synthetic construct
  REGION 1..28: note = TNR1B Linker (2-29)
STSPTRSMAPGAVHLPQPVSTRSQHTQP

SEQ ID NO: 4335 - protein, 27 aa, synthetic construct
  REGION 1..27: note = TNR1B Linker (3-29)
TSPTRSMAPGAVHLPQPVSTRSQHTQP

SEQ ID NO: 4336 - protein, 26 aa, synthetic construct
  REGION 1..26: note = TNR1B Linker (4-29)
SPTRSMAPGAVHLPQPVSTRSQHTQP

SEQ ID NO: 4337 - protein, 25 aa, synthetic construct
  REGION 1..25: note = TNR1B Linker (5-29)
PTRSMAPGAVHLPQPVSTRSQHTQP

SEQ ID NO: 4338 - protein, 24 aa, synthetic construct
  REGION 1..24: note = TNR1B Linker (6-29)
TRSMAPGAVHLPQPVSTRSQHTQP

SEQ ID NO: 4339 - protein, 23 aa, synthetic construct
  REGION 1..23: note = TNR1B Linker (7-29)
RSMAPGAVHLPQPVSTRSQHTQP

SEQ ID NO: 4340 - protein, 22 aa, synthetic construct
  REGION 1..22: note = TNR1B Linker (8-29)
SMAPGAVHLPQPVSTRSQHTQP

SEQ ID NO: 4341 - protein, 21 aa, synthetic construct
  REGION 1..21: note = TNR1B Linker (9-29)
MAPGAVHLPQPVSTRSQHTQP

SEQ ID NO: 4342 - protein, 20 aa, synthetic construct
  REGION 1..20: note = TNR1B Linker (10-29)
APGAVHLPQPVSTRSQHTQP

SEQ ID NO: 4343 - protein, 19 aa, synthetic construct
  REGION 1..19: note = TNR1B Linker (11-29)
PGAVHLPQPVSTRSQHTQP

SEQ ID NO: 4344 - protein, 18 aa, synthetic construct
  REGION 1..18: note = TNR1B Linker (12-29)
GAVHLPQPVSTRSQHTQP

SEQ ID NO: 4345 - protein, 17 aa, synthetic construct
  REGION 1..17: note = TNR1B Linker (13-29)
AVHLPQPVSTRSQHTQP

SEQ ID NO: 4346 - protein, 16 aa, synthetic construct
  REGION 1..16: note = TNR1B Linker (14-29)
VHLPQPVSTRSQHTQP

SEQ ID NO: 4347 - protein, 15 aa, synthetic construct
  REGION 1..15: note = TNR1B Linker (15-29)
HLPQPVSTRSQHTQP

SEQ ID NO: 4348 - protein, 14 aa, synthetic construct
  REGION 1..14: note = TNR1B Linker (16-29)
LPQPVSTRSQHTQP

SEQ ID NO: 4349 - protein, 13 aa, synthetic construct
  REGION 1..13: note = TNR1B Linker (17-29)
PQPVSTRSQHTQP

SEQ ID NO: 4350 - protein, 12 aa, synthetic construct
  REGION 1..12: note = TNR1B Linker (18-29)
QPVSTRSQHTQP

SEQ ID NO: 4351 - protein, 11 aa, synthetic construct
  REGION 1..11: note = TNR1B Linker (19-29)
PVSTRSQHTQP

SEQ ID NO: 4352 - protein, 10 aa, synthetic construct
  REGION 1..10: note = TNR1B Linker (20-29)
VSTRSQHTQP

SEQ ID NO: 4353 - protein, 9 aa, synthetic construct
  REGION 1..9: note = TNR1B Linker (21-29)
STRSQHTQP

SEQ ID NO: 4354 - protein, 8 aa, synthetic construct
  REGION 1..8: note = TNR1B Linker (22-29)
TRSQHTQP

SEQ ID NO: 4355 - protein, 7 aa, synthetic construct
  REGION 1..7: note = TNR1B Linker (23-29)
RSQHTQP

SEQ ID NO: 4356 - protein, 6 aa, synthetic construct
  REGION 1..6: note = TNR1B Linker (24-29)
SQHTQP

SEQ ID NO: 4357 - protein, 5 aa, synthetic construct
  REGION 1..5: note = TNR1B Linker (25-29)
QHTQP

SEQ ID NO: 4358 - protein, 28 aa, synthetic construct
  REGION 1..28: note = TNR1B Linker (1-28)
TSTSPTRSMAPGAVHLPQPVSTRSQHTQ

SEQ ID NO: 4359 - protein, 27 aa, synthetic construct
  REGION 1..27: note = TNR1B Linker (2-28)
STSPTRSMAPGAVHLPQPVSTRSQHTQ

SEQ ID NO: 4360 - protein, 26 aa, synthetic construct
  REGION 1..26: note = TNR1B Linker (3-28)
TSPTRSMAPGAVHLPQPVSTRSQHTQ

SEQ ID NO: 4361 - protein, 25 aa, synthetic construct
  REGION 1..25: note = TNR1B Linker (4-28)
SPTRSMAPGAVHLPQPVSTRSQHTQ

SEQ ID NO: 4362 - protein, 24 aa, synthetic construct
  REGION 1..24: note = TNR1B Linker (5-28)
PTRSMAPGAVHLPQPVSTRSQHTQ

SEQ ID NO: 4363 - protein, 23 aa, synthetic construct
  REGION 1..23: note = TNR1B Linker (6-28)
TRSMAPGAVHLPQPVSTRSQHTQ

SEQ ID NO: 4364 - protein, 22 aa, synthetic construct
  REGION 1..22: note = TNR1B Linker (7-28)
RSMAPGAVHLPQPVSTRSQHTQ

SEQ ID NO: 4365 - protein, 21 aa, synthetic construct
  REGION 1..21: note = TNR1B Linker (8-28)
SMAPGAVHLPQPVSTRSQHTQ

SEQ ID NO: 4366 - protein, 20 aa, synthetic construct
  REGION 1..20: note = TNR1B Linker (9-28)
MAPGAVHLPQPVSTRSQHTQ

SEQ ID NO: 4367 - protein, 19 aa, synthetic construct
  REGION 1..19: note = TNR1B Linker (10-28)
APGAVHLPQPVSTRSQHTQ

SEQ ID NO: 4368 - protein, 18 aa, synthetic construct
  REGION 1..18: note = TNR1B Linker (11-28)
PGAVHLPQPVSTRSQHTQ

SEQ ID NO: 4369 - protein, 17 aa, synthetic construct
  REGION 1..17: note = TNR1B Linker (12-28)
GAVHLPQPVSTRSQHTQ

SEQ ID NO: 4370 - protein, 16 aa, synthetic construct
  REGION 1..16: note = TNR1B Linker (13-28)
AVHLPQPVSTRSQHTQ

SEQ ID NO: 4371 - protein, 15 aa, synthetic construct
  REGION 1..15: note = TNR1B Linker (14-28)
VHLPQPVSTRSQHTQ

SEQ ID NO: 4372 - protein, 14 aa, synthetic construct
  REGION 1..14: note = TNR1B Linker (15-28)
HLPQPVSTRSQHTQ

SEQ ID NO: 4373 - protein, 13 aa, synthetic construct
  REGION 1..13: note = TNR1B Linker (16-28)
LPQPVSTRSQHTQ

SEQ ID NO: 4374 - protein, 12 aa, synthetic construct
  REGION 1..12: note = TNR1B Linker (17-28)
PQPVSTRSQHTQ

SEQ ID NO: 4375 - protein, 11 aa, synthetic construct
  REGION 1..11: note = TNR1B Linker (18-28)
QPVSTRSQHTQ

SEQ ID NO: 4376 - protein, 10 aa, synthetic construct
  REGION 1..10: note = TNR1B Linker (19-28)
PVSTRSQHTQ

SEQ ID NO: 4377 - protein, 9 aa, synthetic construct
  REGION 1..9: note = TNR1B Linker (20-28)
VSTRSQHTQ

SEQ ID NO: 4378 - protein, 8 aa, synthetic construct
  REGION 1..8: note = TNR1B Linker (21-28)
STRSQHTQ

SEQ ID NO: 4379 - protein, 7 aa, synthetic construct
  REGION 1..7: note = TNR1B Linker (22-28)
TRSQHTQ

SEQ ID NO: 4380 - protein, 6 aa, synthetic construct
  REGION 1..6: note = TNR1B Linker (23-28)
RSQHTQ

SEQ ID NO: 4381 - protein, 5 aa, synthetic construct
  REGION 1..5: note = TNR1B Linker (24-28)
SQHTQ

SEQ ID NO: 4382 - protein, 27 aa, synthetic construct
  REGION 1..27: note = TNR1B Linker (1-27)
TSTSPTRSMAPGAVHLPQPVSTRSQHT

SEQ ID NO: 4383 - protein, 26 aa, synthetic construct
  REGION 1..26: note = TNR1B Linker (2-27)
STSPTRSMAPGAVHLPQPVSTRSQHT

SEQ ID NO: 4384 - protein, 25 aa, synthetic construct
  REGION 1..25: note = TNR1B Linker (3-27)
TSPTRSMAPGAVHLPQPVSTRSQHT

SEQ ID NO: 4385 - protein, 24 aa, synthetic construct
  REGION 1..24: note = TNR1B Linker (4-27)
SPTRSMAPGAVHLPQPVSTRSQHT

SEQ ID NO: 4386 - protein, 23 aa, synthetic construct
  REGION 1..23: note = TNR1B Linker (5-27)
PTRSMAPGAVHLPQPVSTRSQHT

SEQ ID NO: 4387 - protein, 22 aa, synthetic construct
  REGION 1..22: note = TNR1B Linker (6-27)
TRSMAPGAVHLPQPVSTRSQHT

SEQ ID NO: 4388 - protein, 21 aa, synthetic construct
  REGION 1..21: note = TNR1B Linker (7-27)
RSMAPGAVHLPQPVSTRSQHT

SEQ ID NO: 4389 - protein, 20 aa, synthetic construct
  REGION 1..20: note = TNR1B Linker (8-27)
SMAPGAVHLPQPVSTRSQHT

SEQ ID NO: 4390 - protein, 19 aa, synthetic construct
  REGION 1..19: note = TNR1B Linker (9-27)
MAPGAVHLPQPVSTRSQHT

SEQ ID NO: 4391 - protein, 18 aa, synthetic construct
  REGION 1..18: note = TNR1B Linker (10-27)
APGAVHLPQPVSTRSQHT

SEQ ID NO: 4392 - protein, 17 aa, synthetic construct
  REGION 1..17: note = TNR1B Linker (11-27)
PGAVHLPQPVSTRSQHT

SEQ ID NO: 4393 - protein, 16 aa, synthetic construct
  REGION 1..16: note = TNR1B Linker (12-27)
GAVHLPQPVSTRSQHT

SEQ ID NO: 4394 - protein, 15 aa, synthetic construct
  REGION 1..15: note = TNR1B Linker (13-27)
AVHLPQPVSTRSQHT

SEQ ID NO: 4395 - protein, 14 aa, synthetic construct
  REGION 1..14: note = TNR1B Linker (14-27)
VHLPQPVSTRSQHT

SEQ ID NO: 4396 - protein, 13 aa, synthetic construct
  REGION 1..13: note = TNR1B Linker (15-27)
HLPQPVSTRSQHT

SEQ ID NO: 4397 - protein, 12 aa, synthetic construct
  REGION 1..12: note = TNR1B Linker (16-27)
LPQPVSTRSQHT

SEQ ID NO: 4398 - protein, 11 aa, synthetic construct
  REGION 1..11: note = TNR1B Linker (17-27)
PQPVSTRSQHT

SEQ ID NO: 4399 - protein, 10 aa, synthetic construct
  REGION 1..10: note = TNR1B Linker (18-27)
QPVSTRSQHT

SEQ ID NO: 4400 - protein, 9 aa, synthetic construct
  REGION 1..9: note = TNR1B Linker (19-27)
PVSTRSQHT

SEQ ID NO: 4401 - protein, 8 aa, synthetic construct
  REGION 1..8: note = TNR1B Linker (20-27)
VSTRSQHT

SEQ ID NO: 4402 - protein, 7 aa, synthetic construct
  REGION 1..7: note = TNR1B Linker (21-27)
STRSQHT

SEQ ID NO: 4403 - protein, 6 aa, synthetic construct
  REGION 1..6: note = TNR1B Linker (22-27)
TRSQHT

SEQ ID NO: 4404 - protein, 5 aa, synthetic construct
  REGION 1..5: note = TNR1B Linker (23-27)
RSQHT

SEQ ID NO: 4405 - protein, 26 aa, synthetic construct
  REGION 1..26: note = TNR1B Linker (1-26)
TSTSPTRSMAPGAVHLPQPVSTRSQH

SEQ ID NO: 4406 - protein, 25 aa, synthetic construct
  REGION 1..25: note = TNR1B Linker (2-26)
STSPTRSMAPGAVHLPQPVSTRSQH

SEQ ID NO: 4407 - protein, 24 aa, synthetic construct
  REGION 1..24: note = TNR1B Linker (3-26)
TSPTRSMAPGAVHLPQPVSTRSQH

SEQ ID NO: 4408 - protein, 23 aa, synthetic construct
  REGION 1..23: note = TNR1B Linker (4-26)
SPTRSMAPGAVHLPQPVSTRSQH

SEQ ID NO: 4409 - protein, 22 aa, synthetic construct
  REGION 1..22: note = TNR1B Linker (5-26)
PTRSMAPGAVHLPQPVSTRSQH

SEQ ID NO: 4410 - protein, 21 aa, synthetic construct
  REGION 1..21: note = TNR1B Linker (6-26)
TRSMAPGAVHLPQPVSTRSQH

SEQ ID NO: 4411 - protein, 20 aa, synthetic construct
  REGION 1..20: note = TNR1B Linker (7-26)
RSMAPGAVHLPQPVSTRSQH

SEQ ID NO: 4412 - protein, 19 aa, synthetic construct
  REGION 1..19: note = TNR1B Linker (8-26)
SMAPGAVHLPQPVSTRSQH

SEQ ID NO: 4413 - protein, 18 aa, synthetic construct
  REGION 1..18: note = TNR1B Linker (9-26)
MAPGAVHLPQPVSTRSQH

SEQ ID NO: 4414 - protein, 17 aa, synthetic construct
  REGION 1..17: note = TNR1B Linker (10-26)
APGAVHLPQPVSTRSQH

SEQ ID NO: 4415 - protein, 16 aa, synthetic construct
  REGION 1..16: note = TNR1B Linker (11-26)
PGAVHLPQPVSTRSQH

SEQ ID NO: 4416 - protein, 15 aa, synthetic construct
  REGION 1..15: note = TNR1B Linker (12-26)
GAVHLPQPVSTRSQH

SEQ ID NO: 4417 - protein, 14 aa, synthetic construct
  REGION 1..14: note = TNR1B Linker (13-26)
AVHLPQPVSTRSQH

SEQ ID NO: 4418 - protein, 13 aa, synthetic construct
  REGION 1..13: note = TNR1B Linker (14-26)
VHLPQPVSTRSQH

SEQ ID NO: 4419 - protein, 12 aa, synthetic construct
  REGION 1..12: note = TNR1B Linker (15-26)
HLPQPVSTRSQH

SEQ ID NO: 4420 - protein, 11 aa, synthetic construct
  REGION 1..11: note = TNR1B Linker (16-26)
LPQPVSTRSQH

SEQ ID NO: 4421 - protein, 10 aa, synthetic construct
  REGION 1..10: note = TNR1B Linker (17-26)
PQPVSTRSQH

SEQ ID NO: 4422 - protein, 9 aa, synthetic construct
  REGION 1..9: note = TNR1B Linker (18-26)
QPVSTRSQH

SEQ ID NO: 4423 - protein, 8 aa, synthetic construct
  REGION 1..8: note = TNR1B Linker (19-26)
PVSTRSQH

SEQ ID NO: 4424 - protein, 7 aa, synthetic construct
  REGION 1..7: note = TNR1B Linker (20-26)
VSTRSQH

SEQ ID NO: 4425 - protein, 6 aa, synthetic construct
  REGION 1..6: note = TNR1B Linker (21-26)
STRSQH

SEQ ID NO: 4426 - protein, 5 aa, synthetic construct
  REGION 1..5: note = TNR1B Linker (22-26)
TRSQH

SEQ ID NO: 4427 - protein, 25 aa, synthetic construct
  REGION 1..25: note = TNR1B Linker (1-25)
TSTSPTRSMAPGAVHLPQPVSTRSQ

SEQ ID NO: 4428 - protein, 24 aa, synthetic construct
  REGION 1..24: note = TNR1B Linker (2-25)
STSPTRSMAPGAVHLPQPVSTRSQ

SEQ ID NO: 4429 - protein, 23 aa, synthetic construct
  REGION 1..23: note = TNR1B Linker (3-25)
TSPTRSMAPGAVHLPQPVSTRSQ

SEQ ID NO: 4430 - protein, 22 aa, synthetic construct
  REGION 1..22: note = TNR1B Linker (4-25)
SPTRSMAPGAVHLPQPVSTRSQ

SEQ ID NO: 4431 - protein, 21 aa, synthetic construct
  REGION 1..21: note = TNR1B Linker (5-25)
PTRSMAPGAVHLPQPVSTRSQ

SEQ ID NO: 4432 - protein, 20 aa, synthetic construct
  REGION 1..20: note = TNR1B Linker (6-25)
TRSMAPGAVHLPQPVSTRSQ

SEQ ID NO: 4433 - protein, 19 aa, synthetic construct
  REGION 1..19: note = TNR1B Linker (7-25)
RSMAPGAVHLPQPVSTRSQ

SEQ ID NO: 4434 - protein, 18 aa, synthetic construct
  REGION 1..18: note = TNR1B Linker (8-25)
SMAPGAVHLPQPVSTRSQ

SEQ ID NO: 4435 - protein, 17 aa, synthetic construct
  REGION 1..17: note = TNR1B Linker (9-25)
MAPGAVHLPQPVSTRSQ

SEQ ID NO: 4436 - protein, 16 aa, synthetic construct
  REGION 1..16: note = TNR1B Linker (10-25)
APGAVHLPQPVSTRSQ

SEQ ID NO: 4437 - protein, 15 aa, synthetic construct
  REGION 1..15: note = TNR1B Linker (11-25)
PGAVHLPQPVSTRSQ

SEQ ID NO: 4438 - protein, 14 aa, synthetic construct
  REGION 1..14: note = TNR1B Linker (12-25)
GAVHLPQPVSTRSQ

SEQ ID NO: 4439 - protein, 13 aa, synthetic construct
  REGION 1..13: note = TNR1B Linker (13-25)
AVHLPQPVSTRSQ

SEQ ID NO: 4440 - protein, 12 aa, synthetic construct
  REGION 1..12: note = TNR1B Linker (14-25)
VHLPQPVSTRSQ

SEQ ID NO: 4441 - protein, 11 aa, synthetic construct
  REGION 1..11: note = TNR1B Linker (15-25)
HLPQPVSTRSQ

SEQ ID NO: 4442 - protein, 10 aa, synthetic construct
  REGION 1..10: note = TNR1B Linker (16-25)
LPQPVSTRSQ

SEQ ID NO: 4443 - protein, 9 aa, synthetic construct
  REGION 1..9: note = TNR1B Linker (17-25)
PQPVSTRSQ

SEQ ID NO: 4444 - protein, 8 aa, synthetic construct
  REGION 1..8: note = TNR1B Linker (18-25)
QPVSTRSQ

SEQ ID NO: 4445 - protein, 7 aa, synthetic construct
  REGION 1..7: note = TNR1B Linker (19-25)
PVSTRSQ

SEQ ID NO: 4446 - protein, 6 aa, synthetic construct
  REGION 1..6: note = TNR1B Linker (20-25)
VSTRSQ

SEQ ID NO: 4447 - protein, 5 aa, synthetic construct
  REGION 1..5: note = TNR1B Linker (21-25)
STRSQ

SEQ ID NO: 4448 - protein, 24 aa, synthetic construct
  REGION 1..24: note = TNR1B Linker (1-24)
TSTSPTRSMAPGAVHLPQPVSTRS

SEQ ID NO: 4449 - protein, 23 aa, synthetic construct
  REGION 1..23: note = TNR1B Linker (2-24)
STSPTRSMAPGAVHLPQPVSTRS

SEQ ID NO: 4450 - protein, 22 aa, synthetic construct
  REGION 1..22: note = TNR1B Linker (3-24)
TSPTRSMAPGAVHLPQPVSTRS

SEQ ID NO: 4451 - protein, 21 aa, synthetic construct
  REGION 1..21: note = TNR1B Linker (4-24)
SPTRSMAPGAVHLPQPVSTRS

SEQ ID NO: 4452 - protein, 20 aa, synthetic construct
  REGION 1..20: note = TNR1B Linker (5-24)
PTRSMAPGAVHLPQPVSTRS

SEQ ID NO: 4453 - protein, 19 aa, synthetic construct
  REGION 1..19: note = TNR1B Linker (6-24)
TRSMAPGAVHLPQPVSTRS

SEQ ID NO: 4454 - protein, 18 aa, synthetic construct
  REGION 1..18: note = TNR1B Linker (7-24)
RSMAPGAVHLPQPVSTRS

SEQ ID NO: 4455 - protein, 17 aa, synthetic construct
  REGION 1..17: note = TNR1B Linker (8-24)
SMAPGAVHLPQPVSTRS

SEQ ID NO: 4456 - protein, 16 aa, synthetic construct
  REGION 1..16: note = TNR1B Linker (9-24)
MAPGAVHLPQPVSTRS

SEQ ID NO: 4457 - protein, 15 aa, synthetic construct
  REGION 1..15: note = TNR1B Linker (10-24)
APGAVHLPQPVSTRS

SEQ ID NO: 4458 - protein, 14 aa, synthetic construct
  REGION 1..14: note = TNR1B Linker (11-24)
PGAVHLPQPVSTRS

SEQ ID NO: 4459 - protein, 13 aa, synthetic construct
  REGION 1..13: note = TNR1B Linker (12-24)
GAVHLPQPVSTRS

SEQ ID NO: 4460 - protein, 12 aa, synthetic construct
  REGION 1..12: note = TNR1B Linker (13-24)
AVHLPQPVSTRS

SEQ ID NO: 4461 - protein, 11 aa, synthetic construct
  REGION 1..11: note = TNR1B Linker (14-24)
VHLPQPVSTRS

SEQ ID NO: 4462 - protein, 10 aa, synthetic construct
  REGION 1..10: note = TNR1B Linker (15-24)
HLPQPVSTRS

SEQ ID NO: 4463 - protein, 9 aa, synthetic construct
  REGION 1..9: note = TNR1B Linker (16-24)
LPQPVSTRS

SEQ ID NO: 4464 - protein, 8 aa, synthetic construct
  REGION 1..8: note = TNR1B Linker (17-24)
PQPVSTRS

SEQ ID NO: 4465 - protein, 7 aa, synthetic construct
  REGION 1..7: note = TNR1B Linker (18-24)
QPVSTRS

SEQ ID NO: 4466 - protein, 6 aa, synthetic construct
  REGION 1..6: note = TNR1B Linker (19-24)
PVSTRS

SEQ ID NO: 4467 - protein, 5 aa, synthetic construct
  REGION 1..5: note = TNR1B Linker (20-24)
VSTRS

SEQ ID NO: 4468 - protein, 23 aa, synthetic construct
  REGION 1..23: note = TNR1B Linker (1-23)
TSTSPTRSMAPGAVHLPQPVSTR

SEQ ID NO: 4469 - protein, 22 aa, synthetic construct
  REGION 1..22: note = TNR1B Linker (2-23)
STSPTRSMAPGAVHLPQPVSTR

SEQ ID NO: 4470 - protein, 21 aa, synthetic construct
  REGION 1..21: note = TNR1B Linker (3-23)
TSPTRSMAPGAVHLPQPVSTR

SEQ ID NO: 4471 - protein, 20 aa, synthetic construct
  REGION 1..20: note = TNR1B Linker (4-23)
SPTRSMAPGAVHLPQPVSTR

SEQ ID NO: 4472 - protein, 19 aa, synthetic construct
  REGION 1..19: note = TNR1B Linker (5-23)
PTRSMAPGAVHLPQPVSTR

SEQ ID NO: 4473 - protein, 18 aa, synthetic construct
  REGION 1..18: note = TNR1B Linker (6-23)
TRSMAPGAVHLPQPVSTR

SEQ ID NO: 4474 - protein, 17 aa, synthetic construct
  REGION 1..17: note = TNR1B Linker (7-23)
RSMAPGAVHLPQPVSTR

SEQ ID NO: 4475 - protein, 16 aa, synthetic construct
  REGION 1..16: note = TNR1B Linker (8-23)
SMAPGAVHLPQPVSTR

SEQ ID NO: 4476 - protein, 15 aa, synthetic construct
  REGION 1..15: note = TNR1B Linker (9-23)
MAPGAVHLPQPVSTR

SEQ ID NO: 4477 - protein, 14 aa, synthetic construct
  REGION 1..14: note = TNR1B Linker (10-23)
APGAVHLPQPVSTR

SEQ ID NO: 4478 - protein, 13 aa, synthetic construct
  REGION 1..13: note = TNR1B Linker (11-23)
PGAVHLPQPVSTR

SEQ ID NO: 4479 - protein, 12 aa, synthetic construct
  REGION 1..12: note = TNR1B Linker (12-23)
GAVHLPQPVSTR

SEQ ID NO: 4480 - protein, 11 aa, synthetic construct
  REGION 1..11: note = TNR1B Linker (13-23)
AVHLPQPVSTR

SEQ ID NO: 4481 - protein, 10 aa, synthetic construct
  REGION 1..10: note = TNR1B Linker (14-23)
VHLPQPVSTR

SEQ ID NO: 4482 - protein, 9 aa, synthetic construct
  REGION 1..9: note = TNR1B Linker (15-23)
HLPQPVSTR

SEQ ID NO: 4483 - protein, 8 aa, synthetic construct
  REGION 1..8: note = TNR1B Linker (16-23)
LPQPVSTR

SEQ ID NO: 4484 - protein, 7 aa, synthetic construct
  REGION 1..7: note = TNR1B Linker (17-23)
PQPVSTR

SEQ ID NO: 4485 - protein, 6 aa, synthetic construct
  REGION 1..6: note = TNR1B Linker (18-23)
QPVSTR

SEQ ID NO: 4486 - protein, 5 aa, synthetic construct
  REGION 1..5: note = TNR1B Linker (19-23)
PVSTR

SEQ ID NO: 4487 - protein, 22 aa, synthetic construct
  REGION 1..22: note = TNR1B Linker (1-22)
TSTSPTRSMAPGAVHLPQPVST

SEQ ID NO: 4488 - protein, 21 aa, synthetic construct
  REGION 1..21: note = TNR1B Linker (2-22)
STSPTRSMAPGAVHLPQPVST

SEQ ID NO: 4489 - protein, 20 aa, synthetic construct
  REGION 1..20: note = TNR1B Linker (3-22)
TSPTRSMAPGAVHLPQPVST

SEQ ID NO: 4490 - protein, 19 aa, synthetic construct
  REGION 1..19: note = TNR1B Linker (4-22)
SPTRSMAPGAVHLPQPVST

SEQ ID NO: 4491 - protein, 18 aa, synthetic construct
  REGION 1..18: note = TNR1B Linker (5-22)
PTRSMAPGAVHLPQPVST

SEQ ID NO: 4492 - protein, 17 aa, synthetic construct
  REGION 1..17: note = TNR1B Linker (6-22)
TRSMAPGAVHLPQPVST

SEQ ID NO: 4493 - protein, 16 aa, synthetic construct
  REGION 1..16: note = TNR1B Linker (7-22)
RSMAPGAVHLPQPVST

SEQ ID NO: 4494 - protein, 15 aa, synthetic construct
  REGION 1..15: note = TNR1B Linker (8-22)
SMAPGAVHLPQPVST

SEQ ID NO: 4495 - protein, 14 aa, synthetic construct
  REGION 1..14: note = TNR1B Linker (9-22)
MAPGAVHLPQPVST

SEQ ID NO: 4496 - protein, 13 aa, synthetic construct
  REGION 1..13: note = TNR1B Linker (10-22)
APGAVHLPQPVST

SEQ ID NO: 4497 - protein, 12 aa, synthetic construct
  REGION 1..12: note = TNR1B Linker (11-22)
PGAVHLPQPVST

SEQ ID NO: 4498 - protein, 11 aa, synthetic construct
  REGION 1..11: note = TNR1B Linker (12-22)
GAVHLPQPVST

SEQ ID NO: 4499 - protein, 10 aa, synthetic construct
  REGION 1..10: note = TNR1B Linker (13-22)
AVHLPQPVST

SEQ ID NO: 4500 - protein, 9 aa, synthetic construct
  REGION 1..9: note = TNR1B Linker (14-22)
VHLPQPVST

SEQ ID NO: 4501 - protein, 8 aa, synthetic construct
  REGION 1..8: note = TNR1B Linker (15-22)
HLPQPVST

SEQ ID NO: 4502 - protein, 7 aa, synthetic construct
  REGION 1..7: note = TNR1B Linker (16-22)
LPQPVST

SEQ ID NO: 4503 - protein, 6 aa, synthetic construct
  REGION 1..6: note = TNR1B Linker (17-22)
PQPVST

SEQ ID NO: 4504 - protein, 5 aa, synthetic construct
  REGION 1..5: note = TNR1B Linker (18-22)
QPVST

SEQ ID NO: 4505 - protein, 21 aa, synthetic construct
  REGION 1..21: note = TNR1B Linker (1-21)
TSTSPTRSMAPGAVHLPQPVS

SEQ ID NO: 4506 - protein, 20 aa, synthetic construct
  REGION 1..20: note = TNR1B Linker (2-21)
STSPTRSMAPGAVHLPQPVS

SEQ ID NO: 4507 - protein, 19 aa, synthetic construct
  REGION 1..19: note = TNR1B Linker (3-21)
TSPTRSMAPGAVHLPQPVS

SEQ ID NO: 4508 - protein, 18 aa, synthetic construct
  REGION 1..18: note = TNR1B Linker (4-21)
SPTRSMAPGAVHLPQPVS

SEQ ID NO: 4509 - protein, 17 aa, synthetic construct
  REGION 1..17: note = TNR1B Linker (5-21)
PTRSMAPGAVHLPQPVS

SEQ ID NO: 4510 - protein, 16 aa, synthetic construct
  REGION 1..16: note = TNR1B Linker (6-21)
TRSMAPGAVHLPQPVS

SEQ ID NO: 4511 - protein, 15 aa, synthetic construct
  REGION 1..15: note = TNR1B Linker (7-21)
RSMAPGAVHLPQPVS

SEQ ID NO: 4512 - protein, 14 aa, synthetic construct
  REGION 1..14: note = TNR1B Linker (8-21)
SMAPGAVHLPQPVS

SEQ ID NO: 4513 - protein, 13 aa, synthetic construct
  REGION 1..13: note = TNR1B Linker (9-21)
MAPGAVHLPQPVS

SEQ ID NO: 4514 - protein, 12 aa, synthetic construct
  REGION 1..12: note = TNR1B Linker (10-21)
APGAVHLPQPVS

SEQ ID NO: 4515 - protein, 11 aa, synthetic construct
  REGION 1..11: note = TNR1B Linker (11-21)
PGAVHLPQPVS

SEQ ID NO: 4516 - protein, 10 aa, synthetic construct
  REGION 1..10: note = TNR1B Linker (12-21)
GAVHLPQPVS

SEQ ID NO: 4517 - protein, 9 aa, synthetic construct
  REGION 1..9: note = TNR1B Linker (13-21)
AVHLPQPVS

SEQ ID NO: 4518 - protein, 8 aa, synthetic construct
  REGION 1..8: note = TNR1B Linker (14-21)
VHLPQPVS

SEQ ID NO: 4519 - protein, 7 aa, synthetic construct
  REGION 1..7: note = TNR1B Linker (15-21)
HLPQPVS

SEQ ID NO: 4520 - protein, 6 aa, synthetic construct
  REGION 1..6: note = TNR1B Linker (16-21)
LPQPVS

SEQ ID NO: 4521 - protein, 5 aa, synthetic construct
  REGION 1..5: note = TNR1B Linker (17-21)
PQPVS

SEQ ID NO: 4522 - protein, 20 aa, synthetic construct
  REGION 1..20: note = TNR1B Linker (1-20)
TSTSPTRSMAPGAVHLPQPV

SEQ ID NO: 4523 - protein, 19 aa, synthetic construct
  REGION 1..19: note = TNR1B Linker (2-20)
STSPTRSMAPGAVHLPQPV

SEQ ID NO: 4524 - protein, 18 aa, synthetic construct
  REGION 1..18: note = TNR1B Linker (3-20)
TSPTRSMAPGAVHLPQPV

SEQ ID NO: 4525 - protein, 17 aa, synthetic construct
  REGION 1..17: note = TNR1B Linker (4-20)
SPTRSMAPGAVHLPQPV

SEQ ID NO: 4526 - protein, 16 aa, synthetic construct
  REGION 1..16: note = TNR1B Linker (5-20)
PTRSMAPGAVHLPQPV

SEQ ID NO: 4527 - protein, 15 aa, synthetic construct
  REGION 1..15: note = TNR1B Linker (6-20)
TRSMAPGAVHLPQPV

SEQ ID NO: 4528 - protein, 14 aa, synthetic construct
  REGION 1..14: note = TNR1B Linker (7-20)
RSMAPGAVHLPQPV

SEQ ID NO: 4529 - protein, 13 aa, synthetic construct
  REGION 1..13: note = TNR1B Linker (8-20)
SMAPGAVHLPQPV

SEQ ID NO: 4530 - protein, 12 aa, synthetic construct
  REGION 1..12: note = TNR1B Linker (9-20)
MAPGAVHLPQPV

SEQ ID NO: 4531 - protein, 11 aa, synthetic construct
  REGION 1..11: note = TNR1B Linker (10-20)
APGAVHLPQPV

SEQ ID NO: 4532 - protein, 10 aa, synthetic construct
  REGION 1..10: note = TNR1B Linker (11-20)
PGAVHLPQPV

SEQ ID NO: 4533 - protein, 9 aa, synthetic construct
  REGION 1..9: note = TNR1B Linker (12-20)
GAVHLPQPV

SEQ ID NO: 4534 - protein, 8 aa, synthetic construct
  REGION 1..8: note = TNR1B Linker (13-20)
AVHLPQPV

SEQ ID NO: 4535 - protein, 7 aa, synthetic construct
  REGION 1..7: note = TNR1B Linker (14-20)
VHLPQPV

SEQ ID NO: 4536 - protein, 6 aa, synthetic construct
  REGION 1..6: note = TNR1B Linker (15-20)
HLPQPV

SEQ ID NO: 4537 - protein, 5 aa, synthetic construct
  REGION 1..5: note = TNR1B Linker (16-20)
LPQPV

SEQ ID NO: 4538 - protein, 19 aa, synthetic construct
  REGION 1..19: note = TNR1B Linker (1-19)
TSTSPTRSMAPGAVHLPQP

SEQ ID NO: 4539 - protein, 18 aa, synthetic construct
  REGION 1..18: note = TNR1B Linker (2-19)
STSPTRSMAPGAVHLPQP

SEQ ID NO: 4540 - protein, 17 aa, synthetic construct
  REGION 1..17: note = TNR1B Linker (3-19)
TSPTRSMAPGAVHLPQP

SEQ ID NO: 4541 - protein, 16 aa, synthetic construct
  REGION 1..16: note = TNR1B Linker (4-19)
SPTRSMAPGAVHLPQP

SEQ ID NO: 4542 - protein, 15 aa, synthetic construct
  REGION 1..15: note = TNR1B Linker (5-19)
PTRSMAPGAVHLPQP

SEQ ID NO: 4543 - protein, 14 aa, synthetic construct
  REGION 1..14: note = TNR1B Linker (6-19)
TRSMAPGAVHLPQP

SEQ ID NO: 4544 - protein, 13 aa, synthetic construct
  REGION 1..13: note = TNR1B Linker (7-19)
RSMAPGAVHLPQP

SEQ ID NO: 4545 - protein, 12 aa, synthetic construct
  REGION 1..12: note = TNR1B Linker (8-19)
SMAPGAVHLPQP

SEQ ID NO: 4546 - protein, 11 aa, synthetic construct
  REGION 1..11: note = TNR1B Linker (9-19)
MAPGAVHLPQP

SEQ ID NO: 4547 - protein, 10 aa, synthetic construct
  REGION 1..10: note = TNR1B Linker (10-19)
APGAVHLPQP

SEQ ID NO: 4548 - protein, 9 aa, synthetic construct
  REGION 1..9: note = TNR1B Linker (11-19)
PGAVHLPQP

SEQ ID NO: 4549 - protein, 8 aa, synthetic construct
  REGION 1..8: note = TNR1B Linker (12-19)
GAVHLPQP

SEQ ID NO: 4550 - protein, 7 aa, synthetic construct
  REGION 1..7: note = TNR1B Linker (13-19)
AVHLPQP

SEQ ID NO: 4551 - protein, 6 aa, synthetic construct
  REGION 1..6: note = TNR1B Linker (14-19)
VHLPQP

SEQ ID NO: 4552 - protein, 5 aa, synthetic construct
  REGION 1..5: note = TNR1B Linker (15-19)
HLPQP

SEQ ID NO: 4553 - protein, 18 aa, synthetic construct
  REGION 1..18: note = TNR1B Linker (1-18)
TSTSPTRSMAPGAVHLPQ

SEQ ID NO: 4554 - protein, 17 aa, synthetic construct
  REGION 1..17: note = TNR1B Linker (2-18)
STSPTRSMAPGAVHLPQ

SEQ ID NO: 4555 - protein, 16 aa, synthetic construct
  REGION 1..16: note = TNR1B Linker (3-18)
TSPTRSMAPGAVHLPQ

SEQ ID NO: 4556 - protein, 15 aa, synthetic construct
  REGION 1..15: note = TNR1B Linker (4-18)
SPTRSMAPGAVHLPQ

SEQ ID NO: 4557 - protein, 14 aa, synthetic construct
  REGION 1..14: note = TNR1B Linker (5-18)
PTRSMAPGAVHLPQ

SEQ ID NO: 4558 - protein, 13 aa, synthetic construct
  REGION 1..13: note = TNR1B Linker (6-18)
TRSMAPGAVHLPQ

SEQ ID NO: 4559 - protein, 12 aa, synthetic construct
  REGION 1..12: note = TNR1B Linker (7-18)
RSMAPGAVHLPQ

SEQ ID NO: 4560 - protein, 11 aa, synthetic construct
  REGION 1..11: note = TNR1B Linker (8-18)
SMAPGAVHLPQ

SEQ ID NO: 4561 - protein, 10 aa, synthetic construct
  REGION 1..10: note = TNR1B Linker (9-18)
MAPGAVHLPQ

SEQ ID NO: 4562 - protein, 9 aa, synthetic construct
  REGION 1..9: note = TNR1B Linker (10-18)
APGAVHLPQ

SEQ ID NO: 4563 - protein, 8 aa, synthetic construct
  REGION 1..8: note = TNR1B Linker (11-18)
PGAVHLPQ

SEQ ID NO: 4564 - protein, 7 aa, synthetic construct
  REGION 1..7: note = TNR1B Linker (12-18)
GAVHLPQ

SEQ ID NO: 4565 - protein, 6 aa, synthetic construct
  REGION 1..6: note = TNR1B Linker (13-18)
AVHLPQ

SEQ ID NO: 4566 - protein, 5 aa, synthetic construct
  REGION 1..5: note = TNR1B Linker (14-18)
VHLPQ

SEQ ID NO: 4567 - protein, 17 aa, synthetic construct
  REGION 1..17: note = TNR1B Linker (1-17)
TSTSPTRSMAPGAVHLP

SEQ ID NO: 4568 - protein, 16 aa, synthetic construct
  REGION 1..16: note = TNR1B Linker (2-17)
STSPTRSMAPGAVHLP

SEQ ID NO: 4569 - protein, 15 aa, synthetic construct
  REGION 1..15: note = TNR1B Linker (3-17)
TSPTRSMAPGAVHLP

SEQ ID NO: 4570 - protein, 14 aa, synthetic construct
  REGION 1..14: note = TNR1B Linker (4-17)
SPTRSMAPGAVHLP

SEQ ID NO: 4571 - protein, 13 aa, synthetic construct
  REGION 1..13: note = TNR1B Linker (5-17)
PTRSMAPGAVHLP

SEQ ID NO: 4572 - protein, 12 aa, synthetic construct
  REGION 1..12: note = TNR1B Linker (6-17)
TRSMAPGAVHLP

SEQ ID NO: 4573 - protein, 11 aa, synthetic construct
  REGION 1..11: note = TNR1B Linker (7-17)
RSMAPGAVHLP

SEQ ID NO: 4574 - protein, 10 aa, synthetic construct
  REGION 1..10: note = TNR1B Linker (8-17)
SMAPGAVHLP

SEQ ID NO: 4575 - protein, 9 aa, synthetic construct
  REGION 1..9: note = TNR1B Linker (9-17)
MAPGAVHLP

SEQ ID NO: 4576 - protein, 8 aa, synthetic construct
  REGION 1..8: note = TNR1B Linker (10-17)
APGAVHLP

SEQ ID NO: 4577 - protein, 7 aa, synthetic construct
  REGION 1..7: note = TNR1B Linker (11-17)
PGAVHLP

SEQ ID NO: 4578 - protein, 6 aa, synthetic construct
  REGION 1..6: note = TNR1B Linker (12-17)
GAVHLP

SEQ ID NO: 4579 - protein, 5 aa, synthetic construct
  REGION 1..5: note = TNR1B Linker (13-17)
AVHLP

SEQ ID NO: 4580 - protein, 16 aa, synthetic construct
  REGION 1..16: note = TNR1B Linker (1-16)
TSTSPTRSMAPGAVHL

SEQ ID NO: 4581 - protein, 15 aa, synthetic construct
  REGION 1..15: note = TNR1B Linker (2-16)
STSPTRSMAPGAVHL

SEQ ID NO: 4582 - protein, 14 aa, synthetic construct
  REGION 1..14: note = TNR1B Linker (3-16)
TSPTRSMAPGAVHL

SEQ ID NO: 4583 - protein, 13 aa, synthetic construct
  REGION 1..13: note = TNR1B Linker (4-16)
SPTRSMAPGAVHL

SEQ ID NO: 4584 - protein, 12 aa, synthetic construct
  REGION 1..12: note = TNR1B Linker (5-16)
PTRSMAPGAVHL

SEQ ID NO: 4585 - protein, 11 aa, synthetic construct
  REGION 1..11: note = TNR1B Linker (6-16)
TRSMAPGAVHL

SEQ ID NO: 4586 - protein, 10 aa, synthetic construct
  REGION 1..10: note = TNR1B Linker (7-16)
RSMAPGAVHL

SEQ ID NO: 4587 - protein, 9 aa, synthetic construct
  REGION 1..9: note = TNR1B Linker (8-16)
SMAPGAVHL

SEQ ID NO: 4588 - protein, 8 aa, synthetic construct
  REGION 1..8: note = TNR1B Linker (9-16)
MAPGAVHL

SEQ ID NO: 4589 - protein, 7 aa, synthetic construct
  REGION 1..7: note = TNR1B Linker (10-16)
APGAVHL

SEQ ID NO: 4590 - protein, 6 aa, synthetic construct
  REGION 1..6: note = TNR1B Linker (11-16)
PGAVHL

SEQ ID NO: 4591 - protein, 5 aa, synthetic construct
  REGION 1..5: note = TNR1B Linker (12-16)
GAVHL

SEQ ID NO: 4592 - protein, 15 aa, synthetic construct
  REGION 1..15: note = TNR1B Linker (1-15)
TSTSPTRSMAPGAVH

SEQ ID NO: 4593 - protein, 14 aa, synthetic construct
  REGION 1..14: note = TNR1B Linker (2-15)
STSPTRSMAPGAVH

SEQ ID NO: 4594 - protein, 13 aa, synthetic construct
  REGION 1..13: note = TNR1B Linker (3-15)
TSPTRSMAPGAVH

SEQ ID NO: 4595 - protein, 12 aa, synthetic construct
  REGION 1..12: note = TNR1B Linker (4-15)
SPTRSMAPGAVH

SEQ ID NO: 4596 - protein, 11 aa, synthetic construct
  REGION 1..11: note = TNR1B Linker (5-15)
PTRSMAPGAVH

SEQ ID NO: 4597 - protein, 10 aa, synthetic construct
  REGION 1..10: note = TNR1B Linker (6-15)
TRSMAPGAVH

SEQ ID NO: 4598 - protein, 9 aa, synthetic construct
  REGION 1..9: note = TNR1B Linker (7-15)
RSMAPGAVH

SEQ ID NO: 4599 - protein, 8 aa, synthetic construct
  REGION 1..8: note = TNR1B Linker (8-15)
SMAPGAVH

SEQ ID NO: 4600 - protein, 7 aa, synthetic construct
  REGION 1..7: note = TNR1B Linker (9-15)
MAPGAVH

SEQ ID NO: 4601 - protein, 6 aa, synthetic construct
  REGION 1..6: note = TNR1B Linker (10-15)
APGAVH

SEQ ID NO: 4602 - protein, 5 aa, synthetic construct
  REGION 1..5: note = TNR1B Linker (11-15)
PGAVH

SEQ ID NO: 4603 - protein, 14 aa, synthetic construct
  REGION 1..14: note = TNR1B Linker (1-14)
TSTSPTRSMAPGAV

SEQ ID NO: 4604 - protein, 13 aa, synthetic construct
  REGION 1..13: note = TNR1B Linker (2-14)
STSPTRSMAPGAV

SEQ ID NO: 4605 - protein, 12 aa, synthetic construct
  REGION 1..12: note = TNR1B Linker (3-14)
TSPTRSMAPGAV

SEQ ID NO: 4606 - protein, 11 aa, synthetic construct
  REGION 1..11: note = TNR1B Linker (4-14)
SPTRSMAPGAV

SEQ ID NO: 4607 - protein, 10 aa, synthetic construct
  REGION 1..10: note = TNR1B Linker (5-14)
PTRSMAPGAV

SEQ ID NO: 4608 - protein, 9 aa, synthetic construct
  REGION 1..9: note = TNR1B Linker (6-14)
TRSMAPGAV

SEQ ID NO: 4609 - protein, 8 aa, synthetic construct
  REGION 1..8: note = TNR1B Linker (7-14)
RSMAPGAV

SEQ ID NO: 4610 - protein, 7 aa, synthetic construct
  REGION 1..7: note = TNR1B Linker (8-14)
SMAPGAV

SEQ ID NO: 4611 - protein, 6 aa, synthetic construct
  REGION 1..6: note = TNR1B Linker (9-14)
MAPGAV

SEQ ID NO: 4612 - protein, 5 aa, synthetic construct
  REGION 1..5: note = TNR1B Linker (10-14)
APGAV

SEQ ID NO: 4613 - protein, 13 aa, synthetic construct
  REGION 1..13: note = TNR1B Linker (1-13)
TSTSPTRSMAPGA

SEQ ID NO: 4614 - protein, 12 aa, synthetic construct
  REGION 1..12: note = TNR1B Linker (2-13)
STSPTRSMAPGA

SEQ ID NO: 4615 - protein, 11 aa, synthetic construct
  REGION 1..11: note = TNR1B Linker (3-13)
TSPTRSMAPGA

SEQ ID NO: 4616 - protein, 10 aa, synthetic construct
  REGION 1..10: note = TNR1B Linker (4-13)
SPTRSMAPGA

SEQ ID NO: 4617 - protein, 9 aa, synthetic construct
  REGION 1..9: note = TNR1B Linker (5-13)
PTRSMAPGA

SEQ ID NO: 4618 - protein, 8 aa, synthetic construct
  REGION 1..8: note = TNR1B Linker (6-13)
TRSMAPGA

SEQ ID NO: 4619 - protein, 7 aa, synthetic construct
  REGION 1..7: note = TNR1B Linker (7-13)
RSMAPGA

SEQ ID NO: 4620 - protein, 6 aa, synthetic construct
  REGION 1..6: note = TNR1B Linker (8-13)
SMAPGA

SEQ ID NO: 4621 - protein, 5 aa, synthetic construct
  REGION 1..5: note = TNR1B Linker (9-13)
MAPGA

SEQ ID NO: 4622 - protein, 12 aa, synthetic construct
  REGION 1..12: note = TNR1B Linker (1-12)
TSTSPTRSMAPG

SEQ ID NO: 4623 - protein, 11 aa, synthetic construct
  REGION 1..11: note = TNR1B Linker (2-12)
STSPTRSMAPG

SEQ ID NO: 4624 - protein, 10 aa, synthetic construct
  REGION 1..10: note = TNR1B Linker (3-12)
TSPTRSMAPG

SEQ ID NO: 4625 - protein, 9 aa, synthetic construct
  REGION 1..9: note = TNR1B Linker (4-12)
SPTRSMAPG

SEQ ID NO: 4626 - protein, 8 aa, synthetic construct
  REGION 1..8: note = TNR1B Linker (5-12)
PTRSMAPG

SEQ ID NO: 4627 - protein, 7 aa, synthetic construct
  REGION 1..7: note = TNR1B Linker (6-12)
TRSMAPG

SEQ ID NO: 4628 - protein, 6 aa, synthetic construct
  REGION 1..6: note = TNR1B Linker (7-12)
RSMAPG

SEQ ID NO: 4629 - protein, 5 aa, synthetic construct
  REGION 1..5: note = TNR1B Linker (8-12)
SMAPG

SEQ ID NO: 4630 - protein, 11 aa, synthetic construct
  REGION 1..11: note = TNR1B Linker (1-11)
TSTSPTRSMAP

SEQ ID NO: 4631 - protein, 10 aa, synthetic construct
  REGION 1..10: note = TNR1B Linker (2-11)
STSPTRSMAP

SEQ ID NO: 4632 - protein, 9 aa, synthetic construct
  REGION 1..9: note = TNR1B Linker (3-11)
TSPTRSMAP

SEQ ID NO: 4633 - protein, 8 aa, synthetic construct
  REGION 1..8: note = TNR1B Linker (4-11)
SPTRSMAP

SEQ ID NO: 4634 - protein, 7 aa, synthetic construct
  REGION 1..7: note = TNR1B Linker (5-11)
PTRSMAP

SEQ ID NO: 4635 - protein, 6 aa, synthetic construct
  REGION 1..6: note = TNR1B Linker (6-11)
TRSMAP

SEQ ID NO: 4636 - protein, 5 aa, synthetic construct
  REGION 1..5: note = TNR1B Linker (7-11)
RSMAP

SEQ ID NO: 4637 - protein, 10 aa, synthetic construct
  REGION 1..10: note = TNR1B Linker (1-10)
TSTSPTRSMA

SEQ ID NO: 4638 - protein, 9 aa, synthetic construct
  REGION 1..9: note = TNR1B Linker (2-10)
STSPTRSMA

SEQ ID NO: 4639 - protein, 8 aa, synthetic construct
  REGION 1..8: note = TNR1B Linker (3-10)
TSPTRSMA

SEQ ID NO: 4640 - protein, 7 aa, synthetic construct
  REGION 1..7: note = TNR1B Linker (4-10)
SPTRSMA

SEQ ID NO: 4641 - protein, 6 aa, synthetic construct
  REGION 1..6: note = TNR1B Linker (5-10)
PTRSMA

SEQ ID NO: 4642 - protein, 5 aa, synthetic construct
  REGION 1..5: note = TNR1B Linker (6-10)
TRSMA

SEQ ID NO: 4643 - protein, 9 aa, synthetic construct
  REGION 1..9: note = TNR1B Linker (1-9)
TSTSPTRSM

SEQ ID NO: 4644 - protein, 8 aa, synthetic construct
  REGION 1..8: note = TNR1B Linker (2-9)
STSPTRSM

SEQ ID NO: 4645 - protein, 7 aa, synthetic construct
  REGION 1..7: note = TNR1B Linker (3-9)
TSPTRSM

SEQ ID NO: 4646 - protein, 6 aa, synthetic construct
  REGION 1..6: note = TNR1B Linker (4-9)
SPTRSM

SEQ ID NO: 4647 - protein, 5 aa, synthetic construct
  REGION 1..5: note = TNR1B Linker (5-9)
PTRSM

SEQ ID NO: 4648 - protein, 8 aa, synthetic construct
  REGION 1..8: note = TNR1B Linker (1-8)
TSTSPTRS

SEQ ID NO: 4649 - protein, 7 aa, synthetic construct
  REGION 1..7: note = TNR1B Linker (2-8)
STSPTRS

SEQ ID NO: 4650 - protein, 6 aa, synthetic construct
  REGION 1..6: note = TNR1B Linker (3-8)
TSPTRS

SEQ ID NO: 4651 - protein, 5 aa, synthetic construct
  REGION 1..5: note = TNR1B Linker (4-8)
SPTRS

SEQ ID NO: 4652 - protein, 7 aa, synthetic construct
  REGION 1..7: note = TNR1B Linker (1-7)
TSTSPTR

SEQ ID NO: 4653 - protein, 6 aa, synthetic construct
  REGION 1..6: note = TNR1B Linker (2-7)
STSPTR

SEQ ID NO: 4654 - protein, 5 aa, synthetic construct
  REGION 1..5: note = TNR1B Linker (3-7)
TSPTR

SEQ ID NO: 4655 - protein, 6 aa, synthetic construct
  REGION 1..6: note = TNR1B Linker (1-6)
TSTSPT

SEQ ID NO: 4656 - protein, 5 aa, synthetic construct
  REGION 1..5: note = TNR1B Linker (2-6)
STSPT

SEQ ID NO: 4657 - protein, 31 aa, synthetic construct; identical to SEQ ID NO: 321
  REGION 1..31: note = GLP-1 peptide

SEQ ID NO: 4658 - protein, 606 aa, synthetic construct; identical to SEQ ID NO: 723
  REGION 1..606: note = R_VH-CH1/K147E/K213E/CLD201/hole/PGLALA/RF

SEQ ID NO: 4659 - protein, 440 aa, synthetic construct; identical to SEQ ID NO: 660
  REGION 1..440: note = Sp34_VK-CH1/knob/PGLALA/RF

SEQ ID NO: 4660 - protein, 606 aa, synthetic construct; identical to SEQ ID NO: 725
  REGION 1..606: note = R_VH-CH1/Q39K/S183E/CLD201/hole/PGLALA/RF

SEQ ID NO: 4661 - protein, 440 aa, synthetic construct; identical to SEQ ID NO: 661
  REGION 1..440: note = Sp34_VK-CH1/knob/Q38E/S183K/PGLALA/RF

SEQ ID NO: 4662 - protein, 440 aa, synthetic construct; identical to SEQ ID NO: 662
  REGION 1..440: note = Sp34_VK-CH1/knob/Q38K/S183K/PGLALA/RF

SEQ ID NO: 4663 - protein, 450 aa, synthetic construct
  REGION 1..450: note = R_VH-CH1/K147E/K213E/knob/PGLALA
QVQLQQPGAELVKPGASVKMSCKASGYTFTSYNMHWVKQTPGRGLEWIGAIYPGNGDTSYNQKFKGKATLTADKSSSTAYMQLSSLTSEDSAVYYCARSTYYGGDWYFNVWGAGTTVTVSAASTKGPSVFPLAPSSKSTSGGTAALGCLVEDYFPEPVTVSWNSGALTSGVHTFPAVLQSSGLYSLSSVVTVPSSSLGTQTYICNVNHKPSNTKVDEKVEPKSCDKTHTCPPCPAPEAAGGPSVFLFPPKPKDTLMISRTPEVTCVVVDVSHEDPEVKFNWYVDGVEVHNAKTKPREEQYNSTYRVVSVLTVLHQDWLNGKEYKCKVSNKALGAPIEKTISKAKGQPREPQVYTLPPCRDELTKNQVSLWCLVKGFYPSDIAVEWESNGQPENNYKTTPPVLDSDGSFFLYSKLTVDKSRWQQGNVFSCSVMHEALHNHYTQKSLSLSPG

SEQ ID NO: 4664 - protein, 450 aa, synthetic construct
  REGION 1..450: note = R_VH-CH1/Q39K/S183E/knob/PGLALA
QVQLQQPGAELVKPGASVKMSCKASGYTFTSYNMHWVKKTPGRGLEWIGAIYPGNGDTSYNQKFKGKATLTADKSSSTAYMQLSSLTSEDSAVYYCARSTYYGGDWYFNVWGAGTTVTVSAASTKGPSVFPLAPSSKSTSGGTAALGCLVKDYFPEPVTVSWNSGALTSGVHTFPAVLQSSGLYSLESVVTVPSSSLGTQTYICNVNHKPSNTKVDKKVEPKSCDKTHTCPPCPAPEAAGGPSVFLFPPKPKDTLMISRTPEVTCVVVDVSHEDPEVKFNWYVDGVEVHNAKTKPREEQYNSTYRVVSVLTVLHQDWLNGKEYKCKVSNKALGAPIEKTISKAKGQPREPQVYTLPPCRDELTKNQVSLWCLVKGFYPSDIAVEWESNGQPENNYKTTPPVLDSDGSFFLYSKLTVDKSRWQQGNVFSCSVMHEALHNHYTQKSLSLSPG

SEQ ID NO: 4665 - protein, 594 aa, synthetic construct
  REGION 1..594: note = R_VH-CH1/K147E/K213E/CLD201/Sp34_VK-CH1
QVQLQQPGAELVKPGASVKMSCKASGYTFTSYNMHWVKQTPGRGLEWIGAIYPGNGDTSYNQKFKGKATLTADKSSSTAYMQLSSLTSEDSAVYYCARSTYYGGDWYFNVWGAGTTVTVSAASTKGPSVFPLAPSSKSTSGGTAALGCLVEDYFPEPVTVSWNSGALTSGVHTFPAVLQSSGLYSLSSVVTVPSSSLGTQTYICNVNHKPSNTKVDEKVEPKSCTDWSPYADQSIKVRISLKSALGDKAYEWNDNEMYLFRSSVAYAMRQYFLKVKNQMILFGEEDVRVANLKPRISFNFFVTAPKNVSDIIPRTEVEKAIRMSRSRINDAFRLNDNSLEFLGIQPTLGPPNQPPVSTSTSPTRSMAPGAVHLPQPVSTRQAVVTQEPSLTVSPGGTVTLTCGSSTGAVTTSNYANWVQEKPGQAFRGLIGGTNKRAPGTPARFSGSLLGGKAALTLSGAQPEDEAEYYCALWYSNLWVFGGGTKLTVLSSASTKGPSVFPLAPSSKSTSGGTAALGCLVKDYFPEPVTVSWNSGALTSGVHTFPAVLQSSGLYSLSSVVTVPSSSLGTQTYICNVNHKPSNTKVDKKVEPKSC

SEQ ID NO: 4666 - protein, 594 aa, synthetic construct
  REGION 1..594: note = R_VH-CH1/Q39K/S183E/CLD201/Sp34_VK-CH1/Q38E/S183K
QVQLQQPGAELVKPGASVKMSCKASGYTFTSYNMHWVKKTPGRGLEWIGAIYPGNGDTSYNQKFKGKATLTADKSSSTAYMQLSSLTSEDSAVYYCARSTYYGGDWYFNVWGAGTTVTVSAASTKGPSVFPLAPSSKSTSGGTAALGCLVKDYFPEPVTVSWNSGALTSGVHTFPAVLQSSGLYSLESVVTVPSSSLGTQTYICNVNHKPSNTKVDKKVEPKSCTDWSPYADQSIKVRISLKSALGDKAYEWNDNEMYLFRSSVAYAMRQYFLKVKNQMILFGEEDVRVANLKPRISFNFFVTAPKNVSDIIPRTEVEKAIRMSRSRINDAFRLNDNSLEFLGIQPTLGPPNQPPVSTSTSPTRSMAPGAVHLPQPVSTRQAVVTQEPSLTVSPGGTVTLTCGSSTGAVTTSNYANWVQEKPGQAFRGLIGGTNKRAPGTPARFSGSLLGGKAALTLSGAQPEDEAEYYCALWYSNLWVFGGGTKLTVLSSASTKGPSVFPLAPSSKSTSGGTAALGCLVKDYFPEPVTVSWNSGALTSGVHTFPAVLQSSGLYSLKSVVTVPSSSLGTQTYICNVNHKPSNTKVDKKVEPKSC

SEQ ID NO: 4667 - protein, 594 aa, synthetic construct
  REGION 1..594: note = R_VH-CH1/Q39K/S183E/CLD201/Sp34_VK-CH1/Q38K/S183K
QVQLQQPGAELVKPGASVKMSCKASGYTFTSYNMHWVKKTPGRGLEWIGAIYPGNGDTSYNQKFKGKATLTADKSSSTAYMQLSSLTSEDSAVYYCARSTYYGGDWYFNVWGAGTTVTVSAASTKGPSVFPLAPSSKSTSGGTAALGCLVKDYFPEPVTVSWNSGALTSGVHTFPAVLQSSGLYSLESVVTVPSSSLGTQTYICNVNHKPSNTKVDKKVEPKSCTDWSPYADQSIKVRISLKSALGDKAYEWNDNEMYLFRSSVAYAMRQYFLKVKNQMILFGEEDVRVANLKPRISFNFFVTAPKNVSDIIPRTEVEKAIRMSRSRINDAFRLNDNSLEFLGIQPTLGPPNQPPVSTSTSPTRSMAPGAVHLPQPVSTRQAVVTQEPSLTVSPGGTVTLTCGSSTGAVTTSNYANWVQKKPGQAFRGLIGGTNKRAPGTPARFSGSLLGGKAALTLSGAQPEDEAEYYCALWYSNLWVFGGGTKLTVLSSASTKGPSVFPLAPSSKSTSGGTAALGCLVKDYFPEPVTVSWNSGALTSGVHTFPAVLQSSGLYSLKSVVTVPSSSLGTQTYICNVNHKPSNTKVDKKVEPKSC

SEQ ID NO: 4668 - protein, 605 aa, synthetic construct; identical to SEQ ID NO: 728
  REGION 1..605: note = FMC63_VH-CH1/N84S/K147E/K213E/CLD201/hole/PGLALA/RF

SEQ ID NO: 4669 - protein, 605 aa, synthetic construct; identical to SEQ ID NO: 730
  REGION 1..605: note = FMC63_VH-CH1/N84S/Q39K/S183E/CLD201/hole/PGLALA/RF

SEQ ID NO: 4670 - protein, 449 aa, synthetic construct
  REGION 1..449: note = FMC63_VH-CH1/N84S/K147E/K213E/knob/PGLALA
EVKLQESGPGLVAPSQSLSVTCTVSGVSLPDYGVSWIRQPPRKGLEWLGVIWGSETTYYNSALKSRLTIIKDNSKSQVFLKMSSLQTDDTAIYYCAKHYYYGGSYAMDYWGQGTSVTVSSASTKGPSVFPLAPSSKSTSGGTAALGCLVEDYFPEPVTVSWNSGALTSGVHTFPAVLQSSGLYSLSSVVTVPSSSLGTQTYICNVNHKPSNTKVDEKVEPKSCDKTHTCPPCPAPEAAGGPSVFLFPPKPKDTLMISRTPEVTCVVVDVSHEDPEVKFNWYVDGVEVHNAKTKPREEQYNSTYRVVSVLTVLHQDWLNGKEYKCKVSNKALGAPIEKTISKAKGQPREPQVYTLPPCRDELTKNQVSLWCLVKGFYPSDIAVEWESNGQPENNYKTTPPVLDSDGSFFLYSKLTVDKSRWQQGNVFSCSVMHEALHNHYTQKSLSLSPG

SEQ ID NO: 4671 - protein, 449 aa, synthetic construct
  REGION 1..449: note = FMC63_VH-CH1/N84S/Q39K/S183E/knob/PGLALA
EVKLQESGPGLVAPSQSLSVTCTVSGVSLPDYGVSWIRKPPRKGLEWLGVIWGSETTYYNSALKSRLTIIKDNSKSQVFLKMSSLQTDDTAIYYCAKHYYYGGSYAMDYWGQGTSVTVSSASTKGPSVFPLAPSSKSTSGGTAALGCLVKDYFPEPVTVSWNSGALTSGVHTFPAVLQSSGLYSLESVVTVPSSSLGTQTYICNVNHKPSNTKVDKKVEPKSCDKTHTCPPCPAPEAAGGPSVFLFPPKPKDTLMISRTPEVTCVVVDVSHEDPEVKFNWYVDGVEVHNAKTKPREEQYNSTYRVVSVLTVLHQDWLNGKEYKCKVSNKALGAPIEKTISKAKGQPREPQVYTLPPCRDELTKNQVSLWCLVKGFYPSDIAVEWESNGQPENNYKTTPPVLDSDGSFFLYSKLTVDKSRWQQGNVFSCSVMHEALHNHYTQKSLSLSPG

SEQ ID NO: 4672 - protein, 593 aa, synthetic construct
  REGION 1..593: note = FMC63_VH-CH1/N84S/K147E/K213E/CLD201/Sp34_VK-CH1
EVKLQESGPGLVAPSQSLSVTCTVSGVSLPDYGVSWIRQPPRKGLEWLGVIWGSETTYYNSALKSRLTIIKDNSKSQVFLKMSSLQTDDTAIYYCAKHYYYGGSYAMDYWGQGTSVTVSSASTKGPSVFPLAPSSKSTSGGTAALGCLVEDYFPEPVTVSWNSGALTSGVHTFPAVLQSSGLYSLSSVVTVPSSSLGTQTYICNVNHKPSNTKVDEKVEPKSCTDWSPYADQSIKVRISLKSALGDKAYEWNDNEMYLFRSSVAYAMRQYFLKVKNQMILFGEEDVRVANLKPRISFNFFVTAPKNVSDIIPRTEVEKAIRMSRSRINDAFRLNDNSLEFLGIQPTLGPPNQPPVSTSTSPTRSMAPGAVHLPQPVSTRQAVVTQEPSLTVSPGGTVTLTCGSSTGAVTTSNYANWVQEKPGQAFRGLIGGTNKRAPGTPARFSGSLLGGKAALTLSGAQPEDEAEYYCALWYSNLWVFGGGTKLTVLSSASTKGPSVFPLAPSSKSTSGGTAALGCLVKDYFPEPVTVSWNSGALTSGVHTFPAVLQSSGLYSLSSVVTVPSSSLGTQTYICNVNHKPSNTKVDKKVEPKSC

SEQ ID NO: 4673 - protein, 593 aa, synthetic construct
  REGION 1..593: note FMC63_VH-CH1/N84S/Q39K/S183E/CLD201/Sp34_VK-CH1/Q38E/S183K
EVKLQESGPGLVAPSQSLSVTCTVSGVSLPDYGVSWIRKPPRKGLEWLGVIWGSETTYYNSALKSRLTIIKDNSKSQVFLKMSSLQTDDTAIYYCAKHYYYGGSYAMDYWGQGTSVTVSSASTKGPSVFPLAPSSKSTSGGTAALGCLVKDYFPEPVTVSWNSGALTSGVHTFPAVLQSSGLYSLESVVTVPSSSLGTQTYICNVNHKPSNTKVDKKVEPKSCTDWSPYADQSIKVRISLKSALGDKAYEWNDNEMYLFRSSVAYAMRQYFLKVKNQMILFGEEDVRVANLKPRISFNFFVTAPKNVSDIIPRTEVEKAIRMSRSRINDAFRLNDNSLEFLGIQPTLGPPNQPPVSTSTSPTRSMAPGAVHLPQPVSTRQAVVTQEPSLTVSPGGTVTLTCGSSTGAVTTSNYANWVQEKPGQAFRGLIGGTNKRAPGTPARFSGSLLGGKAALTLSGAQPEDEAEYYCALWYSNLWVFGGGTKLTVLSSASTKGPSVFPLAPSSKSTSGGTAALGCLVKDYFPEPVTVSWNSGALTSGVHTFPAVLQSSGLYSLKSVVTVPSSSLGTQTYICNVNHKPSNTKVDKKVEPKSC

SEQ ID NO: 4674 - protein, 593 aa, synthetic construct
  REGION 1..593: note FMC63_VH-CH1/N84S/Q39K/S183E/CLD201/Sp34_VK-CH1/Q38K/S183K
EVKLQESGPGLVAPSQSLSVTCTVSGVSLPDYGVSWIRKPPRKGLEWLGVIWGSETTYYNSALKSRLTIIKDNSKSQVFLKMSSLQTDDTAIYYCAKHYYYGGSYAMDYWGQGTSVTVSSASTKGPSVFPLAPSSKSTSGGTAALGCLVKDYFPEPVTVSWNSGALTSGVHTFPAVLQSSGLYSLESVVTVPSSSLGTQTYICNVNHKPSNTKVDKKVEPKSCTDWSPYADQSIKVRISLKSALGDKAYEWNDNEMYLFRSSVAYAMRQYFLKVKNQMILFGEEDVRVANLKPRISFNFFVTAPKNVSDIIPRTEVEKAIRMSRSRINDAFRLNDNSLEFLGIQPTLGPPNQPPVSTSTSPTRSMAPGAVHLPQPVSTRQAVVTQEPSLTVSPGGTVTLTCGSSTGAVTTSNYANWVQKKPGQAFRGLIGGTNKRAPGTPARFSGSLLGGKAALTLSGAQPEDEAEYYCALWYSNLWVFGGGTKLTVLSSASTKGPSVFPLAPSSKSTSGGTAALGCLVKDYFPEPVTVSWNSGALTSGVHTFPAVLQSSGLYSLKSVVTVPSSSLGTQTYICNVNHKPSNTKVDKKVEPKSC

SEQ ID NO: 4675 - protein, 604 aa, synthetic construct
  REGION 1..604: note = Ob_VH-CH1/K147E/K213E/CLD201/hole/PGLALA/RF
QVQLVQSGAEVKKPGSSVKVSCKASGYAFSYSWINWVRQAPGQGLEWMGRIFPGDGDTDYNGKFKGRVTITADKSTSTAYMELSSLRSEDTAVYYCARNVFDGYWLVYWGQGTLVTVSSASTKGPSVFPLAPSSKSTSGGTAALGCLVEDYFPEPVTVSWNSGALTSGVHTFPAVLQSSGLYSLSSVVTVPSSSLGTQTYICNVNHKPSNTKVDEKVEPKSCTDWSPYADQSIKVRISLKSALGDKAYEWNDNEMYLFRSSVAYAMRQYFLKVKNQMILFGEEDVRVANLKPRISFNFFVTAPKNVSDIIPRTEVEKAIRMSRSRINDAFRLNDNSLEFLGIQPTLGPPNQPPVSTSTSPTRSMAPGAVHLPQPVSTRDKTHTCPPCPAPEAAGGPSVFLFPPKPKDTLMISRTPEVTCVVVDVSHEDPEVKFNWYVDGVEVHNAKTKPREEQYNSTYRVVSVLTVLHQDWLNGKEYKCKVSNKALGAPIEKTISKAKGQPREPQVCTLPPSRDELTKNQVSLSCAVKGFYPSDIAVEWESNGQPENNYKTTPPVLDSDGSFFLVSKLTVDKSRWQQGNVFSCSVMHEALHNRFTQKSLSLSPG

SEQ ID NO: 4676 - protein, 604 aa, synthetic construct
  REGION 1..604: note = Ob_VH-CH1/Q39K/S183E/CLD201/hole/PGLALA/RF
QVQLVQSGAEVKKPGSSVKVSCKASGYAFSYSWINWVRKAPGQGLEWMGRIFPGDGDTDYNGKFKGRVTITADKSTSTAYMELSSLRSEDTAVYYCARNVFDGYWLVYWGQGTLVTVSSASTKGPSVFPLAPSSKSTSGGTAALGCLVKDYFPEPVTVSWNSGALTSGVHTFPAVLQSSGLYSLESVVTVPSSSLGTQTYICNVNHKPSNTKVDKKVEPKSCTDWSPYADQSIKVRISLKSALGDKAYEWNDNEMYLFRSSVAYAMRQYFLKVKNQMILFGEEDVRVANLKPRISFNFFVTAPKNVSDIIPRTEVEKAIRMSRSRINDAFRLNDNSLEFLGIQPTLGPPNQPPVSTSTSPTRSMAPGAVHLPQPVSTRDKTHTCPPCPAPEAAGGPSVFLFPPKPKDTLMISRTPEVTCVVVDVSHEDPEVKFNWYVDGVEVHNAKTKPREEQYNSTYRVVSVLTVLHQDWLNGKEYKCKVSNKALGAPIEKTISKAKGQPREPQVCTLPPSRDELTKNQVSLSCAVKGFYPSDIAVEWESNGQPENNYKTTPPVLDSDGSFFLVSKLTVDKSRWQQGNVFSCSVMHEALHNRFTQKSLSLSPG

SEQ ID NO: 4677 - protein, 448 aa, synthetic construct
  REGION 1..448: note = Ob_VH-CH1/K147E/K213E/knob/PGLALA
QVQLVQSGAEVKKPGSSVKVSCKASGYAFSYSWINWVRQAPGQGLEWMGRIFPGDGDTDYNGKFKGRVTITADKSTSTAYMELSSLRSEDTAVYYCARNVFDGYWLVYWGQGTLVTVSSASTKGPSVFPLAPSSKSTSGGTAALGCLVEDYFPEPVTVSWNSGALTSGVHTFPAVLQSSGLYSLSSVVTVPSSSLGTQTYICNVNHKPSNTKVDEKVEPKSCDKTHTCPPCPAPEAAGGPSVFLFPPKPKDTLMISRTPEVTCVVVDVSHEDPEVKFNWYVDGVEVHNAKTKPREEQYNSTYRVVSVLTVLHQDWLNGKEYKCKVSNKALGAPIEKTISKAKGQPREPQVYTLPPCRDELTKNQVSLWCLVKGFYPSDIAVEWESNGQPENNYKTTPPVLDSDGSFFLYSKLTVDKSRWQQGNVFSCSVMHEALHNHYTQKSLSLSPG

SEQ ID NO: 4678 - protein, 448 aa, synthetic construct
  REGION 1..448: note = Ob_VH-CH1/Q39K/S183E/knob/PGLALA
QVQLVQSGAEVKKPGSSVKVSCKASGYAFSYSWINWVRKAPGQGLEWMGRIFPGDGDTDYNGKFKGRVTITADKSTSTAYMELSSLRSEDTAVYYCARNVFDGYWLVYWGQGTLVTVSSASTKGPSVFPLAPSSKSTSGGTAALGCLVKDYFPEPVTVSWNSGALTSGVHTFPAVLQSSGLYSLESVVTVPSSSLGTQTYICNVNHKPSNTKVDKKVEPKSCDKTHTCPPCPAPEAAGGPSVFLFPPKPKDTLMISRTPEVTCVVVDVSHEDPEVKFNWYVDGVEVHNAKTKPREEQYNSTYRVVSVLTVLHQDWLNGKEYKCKVSNKALGAPIEKTISKAKGQPREPQVYTLPPCRDELTKNQVSLWCLVKGFYPSDIAVEWESNGQPENNYKTTPPVLDSDGSFFLYSKLTVDKSRWQQGNVFSCSVMHEALHNHYTQKSLSLSPG

SEQ ID NO: 4679 - protein, 592 aa, synthetic construct
  REGION 1..592: note = Ob_VH-CH1/K147E/K213E/CLD201/Sp34_VK-CH1
QVQLVQSGAEVKKPGSSVKVSCKASGYAFSYSWINWVRQAPGQGLEWMGRIFPGDGDTDYNGKFKGRVTITADKSTSTAYMELSSLRSEDTAVYYCARNVFDGYWLVYWGQGTLVTVSSASTKGPSVFPLAPSSKSTSGGTAALGCLVEDYFPEPVTVSWNSGALTSGVHTFPAVLQSSGLYSLSSVVTVPSSSLGTQTYICNVNHKPSNTKVDEKVEPKSCTDWSPYADQSIKVRISLKSALGDKAYEWNDNEMYLFRSSVAYAMRQYFLKVKNQMILFGEEDVRVANLKPRISFNFFVTAPKNVSDIIPRTEVEKAIRMSRSRINDAFRLNDNSLEFLGIQPTLGPPNQPPVSTSTSPTRSMAPGAVHLPQPVSTRQAVVTQEPSLTVSPGGTVTLTCGSSTGAVTTSNYANWVQEKPGQAFRGLIGGTNKRAPGTPARFSGSLLGGKAALTLSGAQPEDEAEYYCALWYSNLWVFGGGTKLTVLSSASTKGPSVFPLAPSSKSTSGGTAALGCLVKDYFPEPVTVSWNSGALTSGVHTFPAVLQSSGLYSLSSVVTVPSSSLGTQTYICNVNHKPSNTKVDKKVEPKSC

SEQ ID NO: 4680 - protein, 592 aa, synthetic construct
  REGION 1..592: note = Ob_VH-CH1/Q39K/S183E/CLD201/Sp34_VK-CH1/Q38E/S183K
QVQLVQSGAEVKKPGSSVKVSCKASGYAFSYSWINWVRKAPGQGLEWMGRIFPGDGDTDYNGKFKGRVTITADKSTSTAYMELSSLRSEDTAVYYCARNVFDGYWLVYWGQGTLVTVSSASTKGPSVFPLAPSSKSTSGGTAALGCLVKDYFPEPVTVSWNSGALTSGVHTFPAVLQSSGLYSLESVVTVPSSSLGTQTYICNVNHKPSNTKVDKKVEPKSCTDWSPYADQSIKVRISLKSALGDKAYEWNDNEMYLFRSSVAYAMRQYFLKVKNQMILFGEEDVRVANLKPRISFNFFVTAPKNVSDIIPRTEVEKAIRMSRSRINDAFRLNDNSLEFLGIQPTLGPPNQPPVSTSTSPTRSMAPGAVHLPQPVSTRQAVVTQEPSLTVSPGGTVTLTCGSSTGAVTTSNYANWVQEKPGQAFRGLIGGTNKRAPGTPARFSGSLLGGKAALTLSGAQPEDEAEYYCALWYSNLWVFGGGTKLTVLSSASTKGPSVFPLAPSSKSTSGGTAALGCLVKDYFPEPVTVSWNSGALTSGVHTFPAVLQSSGLYSLKSVVTVPSSSLGTQTYICNVNHKPSNTKVDKKVEPKSC

SEQ ID NO: 4681 - protein, 592 aa, synthetic construct
  REGION 1..592: note = Ob_VH-CH1/Q39K/S183E/CLD201/Sp34_VK-CH1/Q38K/S183K
QVQLVQSGAEVKKPGSSVKVSCKASGYAFSYSWINWVRKAPGQGLEWMGRIFPGDGDTDYNGKFKGRVTITADKSTSTAYMELSSLRSEDTAVYYCARNVFDGYWLVYWGQGTLVTVSSASTKGPSVFPLAPSSKSTSGGTAALGCLVKDYFPEPVTVSWNSGALTSGVHTFPAVLQSSGLYSLESVVTVPSSSLGTQTYICNVNHKPSNTKVDKKVEPKSCTDWSPYADQSIKVRISLKSALGDKAYEWNDNEMYLFRSSVAYAMRQYFLKVKNQMILFGEEDVRVANLKPRISFNFFVTAPKNVSDIIPRTEVEKAIRMSRSRINDAFRLNDNSLEFLGIQPTLGPPNQPPVSTSTSPTRSMAPGAVHLPQPVSTRQAVVTQEPSLTVSPGGTVTLTCGSSTGAVTTSNYANWVQKKPGQAFRGLIGGTNKRAPGTPARFSGSLLGGKAALTLSGAQPEDEAEYYCALWYSNLWVFGGGTKLTVLSSASTKGPSVFPLAPSSKSTSGGTAALGCLVKDYFPEPVTVSWNSGALTSGVHTFPAVLQSSGLYSLKSVVTVPSSSLGTQTYICNVNHKPSNTKVDKKVEPKSC

SEQ ID NO: 4682 - protein, 459 aa, synthetic construct
  REGION 1..459: note = Sp34_VK-CH1/knob/PGLALA
MEWSWVFLFFLSVTTGVHSQAVVTQEPSLTVSPGGTVTLTCGSSTGAVTTSNYANWVQEKPGQAFRGLIGGTNKRAPGTPARFSGSLLGGKAALTLSGAQPEDEAEYYCALWYSNLWVFGGGTKLTVLSSASTKGPSVFPLAPSSKSTSGGTAALGCLVKDYFPEPVTVSWNSGALTSGVHTFPAVLQSSGLYSLSSVVTVPSSSLGTQTYICNVNHKPSNTKVDKKVEPKSCDKTHTCPPCPAPEAAGGPSVFLFPPKPKDTLMISRTPEVTCVVVDVSHEDPEVKFNWYVDGVEVHNAKTKPREEQYNSTYRVVSVLTVLHQDWLNGKEYKCKVSNKALGAPIEKTISKAKGQPREPQVYTLPPCRDELTKNQVSLWCLVKGFYPSDIAVEWESNGQPENNYKTTPPVLDSDGSFFLYSKLTVDKSRWQQGNVFSCSVMHEALHNHYTQKSLSLSPG

SEQ ID NO: 4683 - protein, 459 aa, synthetic construct
  REGION 1..459: note = Sp34_VK-CH1/knob/Q38E/S183K/PGLALA
MEWSWVFLFFLSVTTGVHSQAVVTQEPSLTVSPGGTVTLTCGSSTGAVTTSNYANWVQEKPGQAFRGLIGGTNKRAPGTPARFSGSLLGGKAALTLSGAQPEDEAEYYCALWYSNLWVFGGGTKLTVLSSASTKGPSVFPLAPSSKSTSGGTAALGCLVKDYFPEPVTVSWNSGALTSGVHTFPAVLQSSGLYSLKSVVTVPSSSLGTQTYICNVNHKPSNTKVDKKVEPKSCDKTHTCPPCPAPEAAGGPSVFLFPPKPKDTLMISRTPEVTCVVVDVSHEDPEVKFNWYVDGVEVHNAKTKPREEQYNSTYRVVSVLTVLHQDWLNGKEYKCKVSNKALGAPIEKTISKAKGQPREPQVYTLPPCRDELTKNQVSLWCLVKGFYPSDIAVEWESNGQPENNYKTTPPVLDSDGSFFLYSKLTVDKSRWQQGNVFSCSVMHEALHNHYTQKSLSLSPG

SEQ ID NO: 4684 - protein, 459 aa, synthetic construct
  REGION 1..459: note = Sp34_VK-CH1/knob/Q38K/S183K/PGLALA
MEWSWVFLFFLSVTTGVHSQAVVTQEPSLTVSPGGTVTLTCGSSTGAVTTSNYANWVQKKPGQAFRGLIGGTNKRAPGTPARFSGSLLGGKAALTLSGAQPEDEAEYYCALWYSNLWVFGGGTKLTVLSSASTKGPSVFPLAPSSKSTSGGTAALGCLVKDYFPEPVTVSWNSGALTSGVHTFPAVLQSSGLYSLKSVVTVPSSSLGTQTYICNVNHKPSNTKVDKKVEPKSCDKTHTCPPCPAPEAAGGPSVFLFPPKPKDTLMISRTPEVTCVVVDVSHEDPEVKFNWYVDGVEVHNAKTKPREEQYNSTYRVVSVLTVLHQDWLNGKEYKCKVSNKALGAPIEKTISKAKGQPREPQVYTLPPCRDELTKNQVSLWCLVKGFYPSDIAVEWESNGQPENNYKTTPPVLDSDGSFFLYSKLTVDKSRWQQGNVFSCSVMHEALHNHYTQKSLSLSPG

SEQ ID NO: 4685 - protein, 213 aa, synthetic construct; identical to SEQ ID NO: 733
  REGION 1..213: note = R_VK-CK/E123R/Q124K

SEQ ID NO: 4686 - protein, 232 aa, synthetic construct; identical to SEQ ID NO: 697
  REGION 1..232: note = Sp34_VH-CK/N84S

SEQ ID NO: 4687 - protein, 213 aa, synthetic construct; identical to SEQ ID NO: 735
  REGION 1..213: note = R_VK-CK/Q38E/V133K

SEQ ID NO: 4688 - protein, 232 aa, synthetic construct; identical to SEQ ID NO: 698
  REGION 1..232: note = Sp34_VH-CK/N84S/Q39K/V133E

SEQ ID NO: 4689 - protein, 232 aa, synthetic construct; identical to SEQ ID NO: 699
  REGION 1..232: note = Sp34_VH-CK/N84S/Q39E/V133E

SEQ ID NO: 4690 - protein, 214 aa, synthetic construct; identical to SEQ ID NO: 738
  REGION 1..214: note = FMC63_VK-CK/E123R/Q124K

SEQ ID NO: 4691 - protein, 214 aa, synthetic construct; identical to SEQ ID NO: 740
  REGION 1..214: note = FMC63_VK-CK/Q38E/V133K

SEQ ID NO: 4692 - protein, 219 aa, synthetic construct; identical to SEQ ID NO: 38
  REGION 1..219: note = Ob_VK-CK/E123R/Q124K

SEQ ID NO: 4693 - protein, 219 aa, synthetic construct
  REGION 1..219: note = Ob_VK-CK/Q38E/V133K
DIVMTQTPLSLPVTPGEPASISCRSSKSLLHSNGITYLYWYLEKPGQSPQLLIYQMSNLVSGVPDRFSGSGSGTDFTLKISRVEAEDVGVYYCAQNLELPYTFGGGTKVEIKRTVAAPSVFIFPPSDEQLKSGTASVKCLLNNFYPREAKVQWKVDNALQSGNSQESVTEQDSKDSTYSLSSTLTLSKADYEKHKVYACEVTHQGLSSPVTKSFNRGEC

SEQ ID NO: 4694 - protein, 221 aa, synthetic construct; identical to SEQ ID NO: 706
  REGION 1..221: note = Fc6/knob/PGLALA

SEQ ID NO: 4695 - protein, 606 aa, synthetic construct; identical to SEQ ID NO: 709
  REGION 1..606: note = R_VH-CH1/Q39K/S183E/CLD201/hole/RF

SEQ ID NO: 4696 - protein, 438 aa, synthetic construct; identical to SEQ ID NO: 710
  REGION 1..438: note = FMC63_VK-x-CH1/Q38E/S183K/knob

SEQ ID NO: 4697 - protein, 438 aa, synthetic construct; identical to SEQ ID NO: 711
  REGION 1..438: note = FMC63_VK-x-CH1/Q38K/S183K/knob

SEQ ID NO: 4698 - protein, 605 aa, synthetic construct; identical to SEQ ID NO: 714
  REGION 1..605: note = FMC63_VH-CH1/N84S/Q39K/S183E/CLD201/hole/RF

SEQ ID NO: 4699 - protein, 437 aa, synthetic construct; identical to SEQ ID NO: 715
  REGION 1..437: note = R_VK-x-CH1/Q38E/S183K/knob

SEQ ID NO: 4700 - protein, 437 aa, synthetic construct; identical to SEQ ID NO: 716
  REGION 1..437: note = R_VK-x-CH1/Q38K/S183K/knob

SEQ ID NO: 4701 - protein, 606 aa, synthetic construct
  REGION 1..606: note = R_VH-CH1/K147E/K213E/CLD201/hole/SSDA/RF
QVQLQQPGAELVKPGASVKMSCKASGYTFTSYNMHWVKQTPGRGLEWIGAIYPGNGDTSYNQKFKGKATLTADKSSSTAYMQLSSLTSEDSAVYYCARSTYYGGDWYFNVWGAGTTVTVSAASTKGPSVFPLAPSSKSTSGGTAALGCLVEDYFPEPVTVSWNSGALTSGVHTFPAVLQSSGLYSLSSVVTVPSSSLGTQTYICNVNHKPSNTKVDEKVEPKSCTDWSPYADQSIKVRISLKSALGDKAYEWNDNEMYLFRSSVAYAMRQYFLKVKNQMILFGEEDVRVANLKPRISFNFFVTAPKNVSDIIPRTEVEKAIRMSRSRINDAFRLNDNSLEFLGIQPTLGPPNQPPVSTSTSPTRSMAPGAVHLPQPVSTRDKTHTCPPCPAPELLGGPDVFLFPPKPKDTLMISRTPEVTCVVVDVSHEDPEVKFNWYVDGVEVHNAKTKPREEQYNATYRVVSVLTVLHQDWLNGKEYKCKVSNKALPAPIEKTISKAKGQPREPQVCTLPPSRDELTKNQVSLSCAVKGFYPSDIAVEWESNGQPENNYKTTPPVLDSDGSFFLVSKLTVDKSRWQQGNVFSCSVMHEALHNRFTQKSLSLSPG

SEQ ID NO: 4702 - protein, 438 aa, synthetic construct
  REGION 1..438: note = FMC63_VK-x-CH1/knob/AILE
DIQMTQTTSSLSASLGDRVTISCRASQDISKYLNWYQQKPDGTVKLLIYHTSRLHSGVPSRFSGSGSGTDYSLTISNLEQEDIATYFCQQGNTLPYTFGGGTKVEIKSSASTKGPSVFPLAPSSKSTSGGTAALGCLVKDYFPEPVTVSWNSGALTSGVHTFPAVLQSSGLYSLSSVVTVPSSSLGTQTYICNVNHKPSNTKVDKKVEPKSCDKTHTCPPCPAPELLGGPSVFLFPPKPKDTLMISRTPEVTCVVVDVSHEDPEVKFNWYVDGVEVHNAKTKPREEQYNSTYRVVSVLTVLHQDWLNGKEYKCKVSNKALPLPEEKTISKAKGQPREPQVYTLPPCRDELTKNQVSLWCLVKGFYPSDIAVEWESNGQPENNYKTTPPVLDSDGSFFLYSKLTVDKSRWQQGNVFSCSVMHEALHNHYTQKSLSLSPG

SEQ ID NO: 4703 - protein, 606 aa, synthetic construct
  REGION 1..606: note = R_VH-CH1/Q39K/S183E/CLD201/hole/SSDA/RF
QVQLQQPGAELVKPGASVKMSCKASGYTFTSYNMHWVKKTPGRGLEWIGAIYPGNGDTSYNQKFKGKATLTADKSSSTAYMQLSSLTSEDSAVYYCARSTYYGGDWYFNVWGAGTTVTVSAASTKGPSVFPLAPSSKSTSGGTAALGCLVKDYFPEPVTVSWNSGALTSGVHTFPAVLQSSGLYSLESVVTVPSSSLGTQTYICNVNHKPSNTKVDKKVEPKSCTDWSPYADQSIKVRISLKSALGDKAYEWNDNEMYLFRSSVAYAMRQYFLKVKNQMILFGEEDVRVANLKPRISFNFFVTAPKNVSDIIPRTEVEKAIRMSRSRINDAFRLNDNSLEFLGIQPTLGPPNQPPVSTSTSPTRSMAPGAVHLPQPVSTRDKTHTCPPCPAPELLGGPDVFLFPPKPKDTLMISRTPEVTCVVVDVSHEDPEVKFNWYVDGVEVHNAKTKPREEQYNATYRVVSVLTVLHQDWLNGKEYKCKVSNKALPAPIEKTISKAKGQPREPQVCTLPPSRDELTKNQVSLSCAVKGFYPSDIAVEWESNGQPENNYKTTPPVLDSDGSFFLVSKLTVDKSRWQQGNVFSCSVMHEALHNRFTQKSLSLSPG

SEQ ID NO: 4704 - protein, 438 aa, synthetic construct
  REGION 1..438: note = FMC63_VK-x-CH1/Q38E/S183K/knob/AILE
DIQMTQTTSSLSASLGDRVTISCRASQDISKYLNWYQEKPDGTVKLLIYHTSRLHSGVPSRFSGSGSGTDYSLTISNLEQEDIATYFCQQGNTLPYTFGGGTKVEIKSSASTKGPSVFPLAPSSKSTSGGTAALGCLVKDYFPEPVTVSWNSGALTSGVHTFPAVLQSSGLYSLKSVVTVPSSSLGTQTYICNVNHKPSNTKVDKKVEPKSCDKTHTCPPCPAPELLGGPSVFLFPPKPKDTLMISRTPEVTCVVVDVSHEDPEVKFNWYVDGVEVHNAKTKPREEQYNSTYRVVSVLTVLHQDWLNGKEYKCKVSNKALPLPEEKTISKAKGQPREPQVYTLPPCRDELTKNQVSLWCLVKGFYPSDIAVEWESNGQPENNYKTTPPVLDSDGSFFLYSKLTVDKSRWQQGNVFSCSVMHEALHNHYTQKSLSLSPG

SEQ ID NO: 4705 - protein, 438 aa, synthetic construct
  REGION 1..438: note = FMC63_VK-x-CH1/Q38K/S183K/knob/AILE
DIQMTQTTSSLSASLGDRVTISCRASQDISKYLNWYQKKPDGTVKLLIYHTSRLHSGVPSRFSGSGSGTDYSLTISNLEQEDIATYFCQQGNTLPYTFGGGTKVEIKSSASTKGPSVFPLAPSSKSTSGGTAALGCLVKDYFPEPVTVSWNSGALTSGVHTFPAVLQSSGLYSLKSVVTVPSSSLGTQTYICNVNHKPSNTKVDKKVEPKSCDKTHTCPPCPAPELLGGPSVFLFPPKPKDTLMISRTPEVTCVVVDVSHEDPEVKFNWYVDGVEVHNAKTKPREEQYNSTYRVVSVLTVLHQDWLNGKEYKCKVSNKALPLPEEKTISKAKGQPREPQVYTLPPCRDELTKNQVSLWCLVKGFYPSDIAVEWESNGQPENNYKTTPPVLDSDGSFFLYSKLTVDKSRWQQGNVFSCSVMHEALHNHYTQKSLSLSPG

SEQ ID NO: 4706 - protein, 605 aa, synthetic construct
  REGION 1..605: note = FMC63_VH-CH1/N84S/K147E/K213E/CLD201/hole/SSDA/RF
EVKLQESGPGLVAPSQSLSVTCTVSGVSLPDYGVSWIRQPPRKGLEWLGVIWGSETTYYNSALKSRLTIIKDNSKSQVFLKMSSLQTDDTAIYYCAKHYYYGGSYAMDYWGQGTSVTVSSASTKGPSVFPLAPSSKSTSGGTAALGCLVEDYFPEPVTVSWNSGALTSGVHTFPAVLQSSGLYSLSSVVTVPSSSLGTQTYICNVNHKPSNTKVDEKVEPKSCTDWSPYADQSIKVRISLKSALGDKAYEWNDNEMYLFRSSVAYAMRQYFLKVKNQMILFGEEDVRVANLKPRISFNFFVTAPKNVSDIIPRTEVEKAIRMSRSRINDAFRLNDNSLEFLGIQPTLGPPNQPPVSTSTSPTRSMAPGAVHLPQPVSTRDKTHTCPPCPAPELLGGPDVFLFPPKPKDTLMISRTPEVTCVVVDVSHEDPEVKFNWYVDGVEVHNAKTKPREEQYNATYRVVSVLTVLHQDWLNGKEYKCKVSNKALPAPIEKTISKAKGQPREPQVCTLPPSRDELTKNQVSLSCAVKGFYPSDIAVEWESNGQPENNYKTTPPVLDSDGSFFLVSKLTVDKSRWQQGNVFSCSVMHEALHNRFTQKSLSLSPG

SEQ ID NO: 4707 - protein, 437 aa, synthetic construct
  REGION 1..437: note = R_VK-x-CH1/knob/AILE
QIVLSQSPAILSASPGEKVTMTCRASSSVSYIHWFQQKPGSSPKPWIYATSNLASGVPVRFSGSGSGTSYSLTISRVEAEDAATYYCQQWTSNPPTFGGGTKVEIKSSASTKGPSVFPLAPSSKSTSGGTAALGCLVKDYFPEPVTVSWNSGALTSGVHTFPAVLQSSGLYSLSSVVTVPSSSLGTQTYICNVNHKPSNTKVDKKVEPKSCDKTHTCPPCPAPELLGGPSVFLFPPKPKDTLMISRTPEVTCVVVDVSHEDPEVKFNWYVDGVEVHNAKTKPREEQYNSTYRVVSVLTVLHQDWLNGKEYKCKVSNKALPLPEEKTISKAKGQPREPQVYTLPPCRDELTKNQVSLWCLVKGFYPSDIAVEWESNGQPENNYKTTPPVLDSDGSFFLYSKLTVDKSRWQQGNVFSCSVMHEALHNHYTQKSLSLSPG

SEQ ID NO: 4708 - protein, 605 aa, synthetic construct
  REGION 1..605: note = FMC63_VH-CH1/N84S/Q39K/S183E/CLD201/hole/SSDA/RF
EVKLQESGPGLVAPSQSLSVTCTVSGVSLPDYGVSWIRKPPRKGLEWLGVIWGSETTYYNSALKSRLTIIKDNSKSQVFLKMSSLQTDDTAIYYCAKHYYYGGSYAMDYWGQGTSVTVSSASTKGPSVFPLAPSSKSTSGGTAALGCLVKDYFPEPVTVSWNSGALTSGVHTFPAVLQSSGLYSLESVVTVPSSSLGTQTYICNVNHKPSNTKVDKKVEPKSCTDWSPYADQSIKVRISLKSALGDKAYEWNDNEMYLFRSSVAYAMRQYFLKVKNQMILFGEEDVRVANLKPRISFNFFVTAPKNVSDIIPRTEVEKAIRMSRSRINDAFRLNDNSLEFLGIQPTLGPPNQPPVSTSTSPTRSMAPGAVHLPQPVSTRDKTHTCPPCPAPELLGGPDVFLFPPKPKDTLMISRTPEVTCVVVDVSHEDPEVKFNWYVDGVEVHNAKTKPREEQYNATYRVVSVLTVLHQDWLNGKEYKCKVSNKALPAPIEKTISKAKGQPREPQVCTLPPSRDELTKNQVSLSCAVKGFYPSDIAVEWESNGQPENNYKTTPPVLDSDGSFFLVSKLTVDKSRWQQGNVFSCSVMHEALHNRFTQKSLSLSPG

SEQ ID NO: 4709 - protein, 437 aa, synthetic construct
  REGION 1..437: note = R_VK-x-CH1/Q38E/S183K/knob/AILE
QIVLSQSPAILSASPGEKVTMTCRASSSVSYIHWFQEKPGSSPKPWIYATSNLASGVPVRFSGSGSGTSYSLTISRVEAEDAATYYCQQWTSNPPTFGGGTKVEIKSSASTKGPSVFPLAPSSKSTSGGTAALGCLVKDYFPEPVTVSWNSGALTSGVHTFPAVLQSSGLYSLKSVVTVPSSSLGTQTYICNVNHKPSNTKVDKKVEPKSCDKTHTCPPCPAPELLGGPSVFLFPPKPKDTLMISRTPEVTCVVVDVSHEDPEVKFNWYVDGVEVHNAKTKPREEQYNSTYRVVSVLTVLHQDWLNGKEYKCKVSNKALPLPEEKTISKAKGQPREPQVYTLPPCRDELTKNQVSLWCLVKGFYPSDIAVEWESNGQPENNYKTTPPVLDSDGSFFLYSKLTVDKSRWQQGNVFSCSVMHEALHNHYTQKSLSLSPG

SEQ ID NO: 4710 - protein, 437 aa, synthetic construct
  REGION 1..437: note = R_VK-x-CH1/Q38K/S183K/knob/AILE
QIVLSQSPAILSASPGEKVTMTCRASSSVSYIHWFQKKPGSSPKPWIYATSNLASGVPVRFSGSGSGTSYSLTISRVEAEDAATYYCQQWTSNPPTFGGGTKVEIKSSASTKGPSVFPLAPSSKSTSGGTAALGCLVKDYFPEPVTVSWNSGALTSGVHTFPAVLQSSGLYSLKSVVTVPSSSLGTQTYICNVNHKPSNTKVDKKVEPKSCDKTHTCPPCPAPELLGGPSVFLFPPKPKDTLMISRTPEVTCVVVDVSHEDPEVKFNWYVDGVEVHNAKTKPREEQYNSTYRVVSVLTVLHQDWLNGKEYKCKVSNKALPLPEEKTISKAKGQPREPQVYTLPPCRDELTKNQVSLWCLVKGFYPSDIAVEWESNGQPENNYKTTPPVLDSDGSFFLYSKLTVDKSRWQQGNVFSCSVMHEALHNHYTQKSLSLSPG

SEQ ID NO: 4711 - protein, 606 aa, synthetic construct
  REGION 1..606: note = R_VH-CH1/K147E/K213E/CLD201/hole/AILE/RF
QVQLQQPGAELVKPGASVKMSCKASGYTFTSYNMHWVKQTPGRGLEWIGAIYPGNGDTSYNQKFKGKATLTADKSSSTAYMQLSSLTSEDSAVYYCARSTYYGGDWYFNVWGAGTTVTVSAASTKGPSVFPLAPSSKSTSGGTAALGCLVEDYFPEPVTVSWNSGALTSGVHTFPAVLQSSGLYSLSSVVTVPSSSLGTQTYICNVNHKPSNTKVDEKVEPKSCTDWSPYADQSIKVRISLKSALGDKAYEWNDNEMYLFRSSVAYAMRQYFLKVKNQMILFGEEDVRVANLKPRISFNFFVTAPKNVSDIIPRTEVEKAIRMSRSRINDAFRLNDNSLEFLGIQPTLGPPNQPPVSTSTSPTRSMAPGAVHLPQPVSTRDKTHTCPPCPAPELLGGPSVFLFPPKPKDTLMISRTPEVTCVVVDVSHEDPEVKFNWYVDGVEVHNAKTKPREEQYNSTYRVVSVLTVLHQDWLNGKEYKCKVSNKALPLPEEKTISKAKGQPREPQVCTLPPSRDELTKNQVSLSCAVKGFYPSDIAVEWESNGQPENNYKTTPPVLDSDGSFFLVSKLTVDKSRWQQGNVFSCSVMHEALHNRFTQKSLSLSPG

SEQ ID NO: 4712 - protein, 438 aa, synthetic construct
  REGION 1..438: note = FMC63_VK-x-CH1/knob/SSDA
DIQMTQTTSSLSASLGDRVTISCRASQDISKYLNWYQQKPDGTVKLLIYHTSRLHSGVPSRFSGSGSGTDYSLTISNLEQEDIATYFCQQGNTLPYTFGGGTKVEIKSSASTKGPSVFPLAPSSKSTSGGTAALGCLVKDYFPEPVTVSWNSGALTSGVHTFPAVLQSSGLYSLSSVVTVPSSSLGTQTYICNVNHKPSNTKVDKKVEPKSCDKTHTCPPCPAPELLGGPDVFLFPPKPKDTLMISRTPEVTCVVVDVSHEDPEVKFNWYVDGVEVHNAKTKPREEQYNATYRVVSVLTVLHQDWLNGKEYKCKVSNKALPAPIEKTISKAKGQPREPQVYTLPPCRDELTKNQVSLWCLVKGFYPSDIAVEWESNGQPENNYKTTPPVLDSDGSFFLYSKLTVDKSRWQQGNVFSCSVMHEALHNHYTQKSLSLSPG

SEQ ID NO: 4713 - protein, 606 aa, synthetic construct
  REGION 1..606: note = R_VH-CH1/Q39K/S183E/CLD201/hole/AILE/RF
QVQLQQPGAELVKPGASVKMSCKASGYTFTSYNMHWVKKTPGRGLEWIGAIYPGNGDTSYNQKFKGKATLTADKSSSTAYMQLSSLTSEDSAVYYCARSTYYGGDWYFNVWGAGTTVTVSAASTKGPSVFPLAPSSKSTSGGTAALGCLVKDYFPEPVTVSWNSGALTSGVHTFPAVLQSSGLYSLESVVTVPSSSLGTQTYICNVNHKPSNTKVDKKVEPKSCTDWSPYADQSIKVRISLKSALGDKAYEWNDNEMYLFRSSVAYAMRQYFLKVKNQMILFGEEDVRVANLKPRISFNFFVTAPKNVSDIIPRTEVEKAIRMSRSRINDAFRLNDNSLEFLGIQPTLGPPNQPPVSTSTSPTRSMAPGAVHLPQPVSTRDKTHTCPPCPAPELLGGPSVFLFPPKPKDTLMISRTPEVTCVVVDVSHEDPEVKFNWYVDGVEVHNAKTKPREEQYNSTYRVVSVLTVLHQDWLNGKEYKCKVSNKALPLPEEKTISKAKGQPREPQVCTLPPSRDELTKNQVSLSCAVKGFYPSDIAVEWESNGQPENNYKTTPPVLDSDGSFFLVSKLTVDKSRWQQGNVFSCSVMHEALHNRFTQKSLSLSPG

SEQ ID NO: 4714 - protein, 438 aa, synthetic construct
  REGION 1..438: note = FMC63_VK-x-CH1/Q38E/S183K/knob/SSDA
DIQMTQTTSSLSASLGDRVTISCRASQDISKYLNWYQEKPDGTVKLLIYHTSRLHSGVPSRFSGSGSGTDYSLTISNLEQEDIATYFCQQGNTLPYTFGGGTKVEIKSSASTKGPSVFPLAPSSKSTSGGTAALGCLVKDYFPEPVTVSWNSGALTSGVHTFPAVLQSSGLYSLKSVVTVPSSSLGTQTYICNVNHKPSNTKVDKKVEPKSCDKTHTCPPCPAPELLGGPDVFLFPPKPKDTLMISRTPEVTCVVVDVSHEDPEVKFNWYVDGVEVHNAKTKPREEQYNATYRVVSVLTVLHQDWLNGKEYKCKVSNKALPAPIEKTISKAKGQPREPQVYTLPPCRDELTKNQVSLWCLVKGFYPSDIAVEWESNGQPENNYKTTPPVLDSDGSFFLYSKLTVDKSRWQQGNVFSCSVMHEALHNHYTQKSLSLSPG

SEQ ID NO: 4715 - protein, 438 aa, synthetic construct
  REGION 1..438: note = FMC63_VK-x-CH1/Q38K/S183K/knob/SSDA
DIQMTQTTSSLSASLGDRVTISCRASQDISKYLNWYQKKPDGTVKLLIYHTSRLHSGVPSRFSGSGSGTDYSLTISNLEQEDIATYFCQQGNTLPYTFGGGTKVEIKSSASTKGPSVFPLAPSSKSTSGGTAALGCLVKDYFPEPVTVSWNSGALTSGVHTFPAVLQSSGLYSLKSVVTVPSSSLGTQTYICNVNHKPSNTKVDKKVEPKSCDKTHTCPPCPAPELLGGPDVFLFPPKPKDTLMISRTPEVTCVVVDVSHEDPEVKFNWYVDGVEVHNAKTKPREEQYNATYRVVSVLTVLHQDWLNGKEYKCKVSNKALPAPIEKTISKAKGQPREPQVYTLPPCRDELTKNQVSLWCLVKGFYPSDIAVEWESNGQPENNYKTTPPVLDSDGSFFLYSKLTVDKSRWQQGNVFSCSVMHEALHNHYTQKSLSLSPG

SEQ ID NO: 4716 - protein, 605 aa, synthetic construct
  REGION 1..605: note = FMC63_VH-CH1/N84S/K147E/K213E/CLD201/hole/AILE/RF
EVKLQESGPGLVAPSQSLSVTCTVSGVSLPDYGVSWIRQPPRKGLEWLGVIWGSETTYYNSALKSRLTIIKDNSKSQVFLKMSSLQTDDTAIYYCAKHYYYGGSYAMDYWGQGTSVTVSSASTKGPSVFPLAPSSKSTSGGTAALGCLVEDYFPEPVTVSWNSGALTSGVHTFPAVLQSSGLYSLSSVVTVPSSSLGTQTYICNVNHKPSNTKVDEKVEPKSCTDWSPYADQSIKVRISLKSALGDKAYEWNDNEMYLFRSSVAYAMRQYFLKVKNQMILFGEEDVRVANLKPRISFNFFVTAPKNVSDIIPRTEVEKAIRMSRSRINDAFRLNDNSLEFLGIQPTLGPPNQPPVSTSTSPTRSMAPGAVHLPQPVSTRDKTHTCPPCPAPELLGGPSVFLFPPKPKDTLMISRTPEVTCVVVDVSHEDPEVKFNWYVDGVEVHNAKTKPREEQYNSTYRVVSVLTVLHQDWLNGKEYKCKVSNKALPLPEEKTISKAKGQPREPQVCTLPPSRDELTKNQVSLSCAVKGFYPSDIAVEWESNGQPENNYKTTPPVLDSDGSFFLVSKLTVDKSRWQQGNVFSCSVMHEALHNRFTQKSLSLSPG

SEQ ID NO: 4717 - protein, 437 aa, synthetic construct
  REGION 1..437: note = R_VK-x-CH1/knob/SSDA
QIVLSQSPAILSASPGEKVTMTCRASSSVSYIHWFQQKPGSSPKPWIYATSNLASGVPVRFSGSGSGTSYSLTISRVEAEDAATYYCQQWTSNPPTFGGGTKVEIKSSASTKGPSVFPLAPSSKSTSGGTAALGCLVKDYFPEPVTVSWNSGALTSGVHTFPAVLQSSGLYSLSSVVTVPSSSLGTQTYICNVNHKPSNTKVDKKVEPKSCDKTHTCPPCPAPELLGGPDVFLFPPKPKDTLMISRTPEVTCVVVDVSHEDPEVKFNWYVDGVEVHNAKTKPREEQYNATYRVVSVLTVLHQDWLNGKEYKCKVSNKALPAPIEKTISKAKGQPREPQVYTLPPCRDELTKNQVSLWCLVKGFYPSDIAVEWESNGQPENNYKTTPPVLDSDGSFFLYSKLTVDKSRWQQGNVFSCSVMHEALHNHYTQKSLSLSPG

SEQ ID NO: 4718 - protein, 605 aa, synthetic construct
  REGION 1..605: note = FMC63_VH-CH1/N84S/Q39K/S183E/CLD201/hole/AILE/RF
EVKLQESGPGLVAPSQSLSVTCTVSGVSLPDYGVSWIRKPPRKGLEWLGVIWGSETTYYNSALKSRLTIIKDNSKSQVFLKMSSLQTDDTAIYYCAKHYYYGGSYAMDYWGQGTSVTVSSASTKGPSVFPLAPSSKSTSGGTAALGCLVKDYFPEPVTVSWNSGALTSGVHTFPAVLQSSGLYSLESVVTVPSSSLGTQTYICNVNHKPSNTKVDKKVEPKSCTDWSPYADQSIKVRISLKSALGDKAYEWNDNEMYLFRSSVAYAMRQYFLKVKNQMILFGEEDVRVANLKPRISFNFFVTAPKNVSDIIPRTEVEKAIRMSRSRINDAFRLNDNSLEFLGIQPTLGPPNQPPVSTSTSPTRSMAPGAVHLPQPVSTRDKTHTCPPCPAPELLGGPSVFLFPPKPKDTLMISRTPEVTCVVVDVSHEDPEVKFNWYVDGVEVHNAKTKPREEQYNSTYRVVSVLTVLHQDWLNGKEYKCKVSNKALPLPEEKTISKAKGQPREPQVCTLPPSRDELTKNQVSLSCAVKGFYPSDIAVEWESNGQPENNYKTTPPVLDSDGSFFLVSKLTVDKSRWQQGNVFSCSVMHEALHNRFTQKSLSLSPG

SEQ ID NO: 4719 - protein, 437 aa, synthetic construct
  REGION 1..437: note = R_VK-x-CH1/Q38E/S183K/knob/SSDA
QIVLSQSPAILSASPGEKVTMTCRASSSVSYIHWFQEKPGSSPKPWIYATSNLASGVPVRFSGSGSGTSYSLTISRVEAEDAATYYCQQWTSNPPTFGGGTKVEIKSSASTKGPSVFPLAPSSKSTSGGTAALGCLVKDYFPEPVTVSWNSGALTSGVHTFPAVLQSSGLYSLKSVVTVPSSSLGTQTYICNVNHKPSNTKVDKKVEPKSCDKTHTCPPCPAPELLGGPDVFLFPPKPKDTLMISRTPEVTCVVVDVSHEDPEVKFNWYVDGVEVHNAKTKPREEQYNATYRVVSVLTVLHQDWLNGKEYKCKVSNKALPAPIEKTISKAKGQPREPQVYTLPPCRDELTKNQVSLWCLVKGFYPSDIAVEWESNGQPENNYKTTPPVLDSDGSFFLYSKLTVDKSRWQQGNVFSCSVMHEALHNHYTQKSLSLSPG

SEQ ID NO: 4720 - protein, 437 aa, synthetic construct
  REGION 1..437: note = R_VK-x-CH1/Q38K/S183K/knob/SSDA
QIVLSQSPAILSASPGEKVTMTCRASSSVSYIHWFQKKPGSSPKPWIYATSNLASGVPVRFSGSGSGTSYSLTISRVEAEDAATYYCQQWTSNPPTFGGGTKVEIKSSASTKGPSVFPLAPSSKSTSGGTAALGCLVKDYFPEPVTVSWNSGALTSGVHTFPAVLQSSGLYSLKSVVTVPSSSLGTQTYICNVNHKPSNTKVDKKVEPKSCDKTHTCPPCPAPELLGGPDVFLFPPKPKDTLMISRTPEVTCVVVDVSHEDPEVKFNWYVDGVEVHNAKTKPREEQYNATYRVVSVLTVLHQDWLNGKEYKCKVSNKALPAPIEKTISKAKGQPREPQVYTLPPCRDELTKNQVSLWCLVKGFYPSDIAVEWESNGQPENNYKTTPPVLDSDGSFFLYSKLTVDKSRWQQGNVFSCSVMHEALHNHYTQKSLSLSPG

SEQ ID NO: 4721 - protein, 606 aa, synthetic construct
  REGION 1..606: note = R_VH-CH1/K147E/K213E/CLD201/hole/SIDE/RF
QVQLQQPGAELVKPGASVKMSCKASGYTFTSYNMHWVKQTPGRGLEWIGAIYPGNGDTSYNQKFKGKATLTADKSSSTAYMQLSSLTSEDSAVYYCARSTYYGGDWYFNVWGAGTTVTVSAASTKGPSVFPLAPSSKSTSGGTAALGCLVEDYFPEPVTVSWNSGALTSGVHTFPAVLQSSGLYSLSSVVTVPSSSLGTQTYICNVNHKPSNTKVDEKVEPKSCTDWSPYADQSIKVRISLKSALGDKAYEWNDNEMYLFRSSVAYAMRQYFLKVKNQMILFGEEDVRVANLKPRISFNFFVTAPKNVSDIIPRTEVEKAIRMSRSRINDAFRLNDNSLEFLGIQPTLGPPNQPPVSTSTSPTRSMAPGAVHLPQPVSTRDKTHTCPPCPAPELLGGPDVFLFPPKPKDTLMISRTPEVTCVVVDVSHEDPEVKFNWYVDGVEVHNAKTKPREEQYNSTYRVVSVLTVLHQDWLNGKEYKCKVSNKALPAPEEKTISKAKGQPREPQVCTLPPSRDELTKNQVSLSCAVKGFYPSDIAVEWESNGQPENNYKTTPPVLDSDGSFFLVSKLTVDKSRWQQGNVFSCSVMHEALHNRFTQKSLSLSPG

SEQ ID NO: 4722 - protein, 438 aa, synthetic construct
  REGION 1..438: note = FMC63_VK-x-CH1/knob/SIDE
DIQMTQTTSSLSASLGDRVTISCRASQDISKYLNWYQQKPDGTVKLLIYHTSRLHSGVPSRFSGSGSGTDYSLTISNLEQEDIATYFCQQGNTLPYTFGGGTKVEIKSSASTKGPSVFPLAPSSKSTSGGTAALGCLVKDYFPEPVTVSWNSGALTSGVHTFPAVLQSSGLYSLSSVVTVPSSSLGTQTYICNVNHKPSNTKVDKKVEPKSCDKTHTCPPCPAPELLGGPDVFLFPPKPKDTLMISRTPEVTCVVVDVSHEDPEVKFNWYVDGVEVHNAKTKPREEQYNSTYRVVSVLTVLHQDWLNGKEYKCKVSNKALPAPEEKTISKAKGQPREPQVYTLPPCRDELTKNQVSLWCLVKGFYPSDIAVEWESNGQPENNYKTTPPVLDSDGSFFLYSKLTVDKSRWQQGNVFSCSVMHEALHNHYTQKSLSLSPG

SEQ ID NO: 4723 - protein, 606 aa, synthetic construct
  REGION 1..606: note = R_VH-CH1/Q39K/S183E/CLD201/hole/SIDE/RF
QVQLQQPGAELVKPGASVKMSCKASGYTFTSYNMHWVKKTPGRGLEWIGAIYPGNGDTSYNQKFKGKATLTADKSSSTAYMQLSSLTSEDSAVYYCARSTYYGGDWYFNVWGAGTTVTVSAASTKGPSVFPLAPSSKSTSGGTAALGCLVKDYFPEPVTVSWNSGALTSGVHTFPAVLQSSGLYSLESVVTVPSSSLGTQTYICNVNHKPSNTKVDKKVEPKSCTDWSPYADQSIKVRISLKSALGDKAYEWNDNEMYLFRSSVAYAMRQYFLKVKNQMILFGEEDVRVANLKPRISFNFFVTAPKNVSDIIPRTEVEKAIRMSRSRINDAFRLNDNSLEFLGIQPTLGPPNQPPVSTSTSPTRSMAPGAVHLPQPVSTRDKTHTCPPCPAPELLGGPDVFLFPPKPKDTLMISRTPEVTCVVVDVSHEDPEVKFNWYVDGVEVHNAKTKPREEQYNSTYRVVSVLTVLHQDWLNGKEYKCKVSNKALPAPEEKTISKAKGQPREPQVCTLPPSRDELTKNQVSLSCAVKGFYPSDIAVEWESNGQPENNYKTTPPVLDSDGSFFLVSKLTVDKSRWQQGNVFSCSVMHEALHNRFTQKSLSLSPG

SEQ ID NO: 4724 - protein, 438 aa, synthetic construct
  REGION 1..438: note = FMC63_VK-x-CH1/Q38E/S183K/knob/SIDE
DIQMTQTTSSLSASLGDRVTISCRASQDISKYLNWYQEKPDGTVKLLIYHTSRLHSGVPSRFSGSGSGTDYSLTISNLEQEDIATYFCQQGNTLPYTFGGGTKVEIKSSASTKGPSVFPLAPSSKSTSGGTAALGCLVKDYFPEPVTVSWNSGALTSGVHTFPAVLQSSGLYSLKSVVTVPSSSLGTQTYICNVNHKPSNTKVDKKVEPKSCDKTHTCPPCPAPELLGGPDVFLFPPKPKDTLMISRTPEVTCVVVDVSHEDPEVKFNWYVDGVEVHNAKTKPREEQYNSTYRVVSVLTVLHQDWLNGKEYKCKVSNKALPAPEEKTISKAKGQPREPQVYTLPPCRDELTKNQVSLWCLVKGFYPSDIAVEWESNGQPENNYKTTPPVLDSDGSFFLYSKLTVDKSRWQQGNVFSCSVMHEALHNHYTQKSLSLSPG

SEQ ID NO: 4725 - protein, 438 aa, synthetic construct
  REGION 1..438: note = FMC63_VK-x-CH1/Q38K/S183K/knob/SIDE
DIQMTQTTSSLSASLGDRVTISCRASQDISKYLNWYQKKPDGTVKLLIYHTSRLHSGVPSRFSGSGSGTDYSLTISNLEQEDIATYFCQQGNTLPYTFGGGTKVEIKSSASTKGPSVFPLAPSSKSTSGGTAALGCLVKDYFPEPVTVSWNSGALTSGVHTFPAVLQSSGLYSLKSVVTVPSSSLGTQTYICNVNHKPSNTKVDKKVEPKSCDKTHTCPPCPAPELLGGPDVFLFPPKPKDTLMISRTPEVTCVVVDVSHEDPEVKFNWYVDGVEVHNAKTKPREEQYNSTYRVVSVLTVLHQDWLNGKEYKCKVSNKALPAPEEKTISKAKGQPREPQVYTLPPCRDELTKNQVSLWCLVKGFYPSDIAVEWESNGQPENNYKTTPPVLDSDGSFFLYSKLTVDKSRWQQGNVFSCSVMHEALHNHYTQKSLSLSPG

SEQ ID NO: 4726 - protein, 605 aa, synthetic construct
  REGION 1..605: note = FMC63_VH-CH1/N84S/K147E/K213E/CLD201/hole/SIDE/RF
EVKLQESGPGLVAPSQSLSVTCTVSGVSLPDYGVSWIRQPPRKGLEWLGVIWGSETTYYNSALKSRLTIIKDNSKSQVFLKMSSLQTDDTAIYYCAKHYYYGGSYAMDYWGQGTSVTVSSASTKGPSVFPLAPSSKSTSGGTAALGCLVEDYFPEPVTVSWNSGALTSGVHTFPAVLQSSGLYSLSSVVTVPSSSLGTQTYICNVNHKPSNTKVDEKVEPKSCTDWSPYADQSIKVRISLKSALGDKAYEWNDNEMYLFRSSVAYAMRQYFLKVKNQMILFGEEDVRVANLKPRISFNFFVTAPKNVSDIIPRTEVEKAIRMSRSRINDAFRLNDNSLEFLGIQPTLGPPNQPPVSTSTSPTRSMAPGAVHLPQPVSTRDKTHTCPPCPAPELLGGPDVFLFPPKPKDTLMISRTPEVTCVVVDVSHEDPEVKFNWYVDGVEVHNAKTKPREEQYNSTYRVVSVLTVLHQDWLNGKEYKCKVSNKALPAPEEKTISKAKGQPREPQVCTLPPSRDELTKNQVSLSCAVKGFYPSDIAVEWESNGQPENNYKTTPPVLDSDGSFFLVSKLTVDKSRWQQGNVFSCSVMHEALHNRFTQKSLSLSPG

SEQ ID NO: 4727 - protein, 437 aa, synthetic construct
  REGION 1..437: note = R_VK-x-CH1/knob/SIDE
QIVLSQSPAILSASPGEKVTMTCRASSSVSYIHWFQQKPGSSPKPWIYATSNLASGVPVRFSGSGSGTSYSLTISRVEAEDAATYYCQQWTSNPPTFGGGTKVEIKSSASTKGPSVFPLAPSSKSTSGGTAALGCLVKDYFPEPVTVSWNSGALTSGVHTFPAVLQSSGLYSLSSVVTVPSSSLGTQTYICNVNHKPSNTKVDKKVEPKSCDKTHTCPPCPAPELLGGPDVFLFPPKPKDTLMISRTPEVTCVVVDVSHEDPEVKFNWYVDGVEVHNAKTKPREEQYNSTYRVVSVLTVLHQDWLNGKEYKCKVSNKALPAPEEKTISKAKGQPREPQVYTLPPCRDELTKNQVSLWCLVKGFYPSDIAVEWESNGQPENNYKTTPPVLDSDGSFFLYSKLTVDKSRWQQGNVFSCSVMHEALHNHYTQKSLSLSPG

SEQ ID NO: 4728 - protein, 605 aa, synthetic construct
  REGION 1..605: note = FMC63_VH-CH1/N84S/Q39K/S183E/CLD201/hole/SIDE/RF
EVKLQESGPGLVAPSQSLSVTCTVSGVSLPDYGVSWIRKPPRKGLEWLGVIWGSETTYYNSALKSRLTIIKDNSKSQVFLKMSSLQTDDTAIYYCAKHYYYGGSYAMDYWGQGTSVTVSSASTKGPSVFPLAPSSKSTSGGTAALGCLVKDYFPEPVTVSWNSGALTSGVHTFPAVLQSSGLYSLESVVTVPSSSLGTQTYICNVNHKPSNTKVDKKVEPKSCTDWSPYADQSIKVRISLKSALGDKAYEWNDNEMYLFRSSVAYAMRQYFLKVKNQMILFGEEDVRVANLKPRISFNFFVTAPKNVSDIIPRTEVEKAIRMSRSRINDAFRLNDNSLEFLGIQPTLGPPNQPPVSTSTSPTRSMAPGAVHLPQPVSTRDKTHTCPPCPAPELLGGPDVFLFPPKPKDTLMISRTPEVTCVVVDVSHEDPEVKFNWYVDGVEVHNAKTKPREEQYNSTYRVVSVLTVLHQDWLNGKEYKCKVSNKALPAPEEKTISKAKGQPREPQVCTLPPSRDELTKNQVSLSCAVKGFYPSDIAVEWESNGQPENNYKTTPPVLDSDGSFFLVSKLTVDKSRWQQGNVFSCSVMHEALHNRFTQKSLSLSPG

SEQ ID NO: 4729 - protein, 437 aa, synthetic construct
  REGION 1..437: note = R_VK-x-CH1/Q38E/S183K/knob/SIDE
QIVLSQSPAILSASPGEKVTMTCRASSSVSYIHWFQEKPGSSPKPWIYATSNLASGVPVRFSGSGSGTSYSLTISRVEAEDAATYYCQQWTSNPPTFGGGTKVEIKSSASTKGPSVFPLAPSSKSTSGGTAALGCLVKDYFPEPVTVSWNSGALTSGVHTFPAVLQSSGLYSLKSVVTVPSSSLGTQTYICNVNHKPSNTKVDKKVEPKSCDKTHTCPPCPAPELLGGPDVFLFPPKPKDTLMISRTPEVTCVVVDVSHEDPEVKFNWYVDGVEVHNAKTKPREEQYNSTYRVVSVLTVLHQDWLNGKEYKCKVSNKALPAPEEKTISKAKGQPREPQVYTLPPCRDELTKNQVSLWCLVKGFYPSDIAVEWESNGQPENNYKTTPPVLDSDGSFFLYSKLTVDKSRWQQGNVFSCSVMHEALHNHYTQKSLSLSPG

SEQ ID NO: 4730 - protein, 437 aa, synthetic construct
  REGION 1..437: note = R_VK-x-CH1/Q38K/S183K/knob/SIDE
QIVLSQSPAILSASPGEKVTMTCRASSSVSYIHWFQKKPGSSPKPWIYATSNLASGVPVRFSGSGSGTSYSLTISRVEAEDAATYYCQQWTSNPPTFGGGTKVEIKSSASTKGPSVFPLAPSSKSTSGGTAALGCLVKDYFPEPVTVSWNSGALTSGVHTFPAVLQSSGLYSLKSVVTVPSSSLGTQTYICNVNHKPSNTKVDKKVEPKSCDKTHTCPPCPAPELLGGPDVFLFPPKPKDTLMISRTPEVTCVVVDVSHEDPEVKFNWYVDGVEVHNAKTKPREEQYNSTYRVVSVLTVLHQDWLNGKEYKCKVSNKALPAPEEKTISKAKGQPREPQVYTLPPCRDELTKNQVSLWCLVKGFYPSDIAVEWESNGQPENNYKTTPPVLDSDGSFFLYSKLTVDKSRWQQGNVFSCSVMHEALHNHYTQKSLSLSPG

SEQ ID NO: 4731 - protein, 450 aa, synthetic construct
  REGION 1..450: note = R_VH-CH
QVQLQQPGAELVKPGASVKMSCKASGYTFTSYNMHWVKQTPGRGLEWIGAIYPGNGDTSYNQKFKGKATLTADKSSSTAYMQLSSLTSEDSAVYYCARSTYYGGDWYFNVWGAGTTVTVSAASTKGPSVFPLAPSSKSTSGGTAALGCLVKDYFPEPVTVSWNSGALTSGVHTFPAVLQSSGLYSLSSVVTVPSSSLGTQTYICNVNHKPSNTKVDKKAEPKSCDKTHTCPPCPAPELLGGPSVFLFPPKPKDTLMISRTPEVTCVVVDVSHEDPEVKFNWYVDGVEVHNAKTKPREEQYNSTYRVVSVLTVLHQDWLNGKEYKCKVSNKALPAPIEKTISKAKGQPREPQVYTLPPSRDELTKNQVSLTCLVKGFYPSDIAVEWESNGQPENNYKTTPPVLDSDGSFFLYSKLTVDKSRWQQGNVFSCSVMHEALHNHYTQKSLSLSPG

SEQ ID NO: 4732 - protein, 450 aa, synthetic construct
  REGION 1..450: note = R_VH-CH/SIDE
QVQLQQPGAELVKPGASVKMSCKASGYTFTSYNMHWVKQTPGRGLEWIGAIYPGNGDTSYNQKFKGKATLTADKSSSTAYMQLSSLTSEDSAVYYCARSTYYGGDWYFNVWGAGTTVTVSAASTKGPSVFPLAPSSKSTSGGTAALGCLVKDYFPEPVTVSWNSGALTSGVHTFPAVLQSSGLYSLSSVVTVPSSSLGTQTYICNVNHKPSNTKVDKKAEPKSCDKTHTCPPCPAPELLGGPDVFLFPPKPKDTLMISRTPEVTCVVVDVSHEDPEVKFNWYVDGVEVHNAKTKPREEQYNSTYRVVSVLTVLHQDWLNGKEYKCKVSNKALPAPEEKTISKAKGQPREPQVYTLPPSRDELTKNQVSLTCLVKGFYPSDIAVEWESNGQPENNYKTTPPVLDSDGSFFLYSKLTVDKSRWQQGNVFSCSVMHEALHNHYTQKSLSLSPG

SEQ ID NO: 4733 - protein, 606 aa, synthetic construct
  REGION 1..606: note = R_VH-CH1/CLD201/hole/RF
QVQLQQPGAELVKPGASVKMSCKASGYTFTSYNMHWVKQTPGRGLEWIGAIYPGNGDTSYNQKFKGKATLTADKSSSTAYMQLSSLTSEDSAVYYCARSTYYGGDWYFNVWGAGTTVTVSAASTKGPSVFPLAPSSKSTSGGTAALGCLVKDYFPEPVTVSWNSGALTSGVHTFPAVLQSSGLYSLSSVVTVPSSSLGTQTYICNVNHKPSNTKVDKKVEPKSCTDWSPYADQSIKVRISLKSALGDKAYEWNDNEMYLFRSSVAYAMRQYFLKVKNQMILFGEEDVRVANLKPRISFNFFVTAPKNVSDIIPRTEVEKAIRMSRSRINDAFRLNDNSLEFLGIQPTLGPPNQPPVSTSTSPTRSMAPGAVHLPQPVSTRDKTHTCPPCPAPELLGGPSVFLFPPKPKDTLMISRTPEVTCVVVDVSHEDPEVKFNWYVDGVEVHNAKTKPREEQYNSTYRVVSVLTVLHQDWLNGKEYKCKVSNKALPAPIEKTISKAKGQPREPQVCTLPPSRDELTKNQVSLSCAVKGFYPSDIAVEWESNGQPENNYKTTPPVLDSDGSFFLVSKLTVDKSRWQQGNVFSCSVMHEALHNRFTQKSLSLSPG

SEQ ID NO: 4734 - protein, 450 aa, synthetic construct
  REGION 1..450: note = R_VH-CH1/knob
QVQLQQPGAELVKPGASVKMSCKASGYTFTSYNMHWVKQTPGRGLEWIGAIYPGNGDTSYNQKFKGKATLTADKSSSTAYMQLSSLTSEDSAVYYCARSTYYGGDWYFNVWGAGTTVTVSAASTKGPSVFPLAPSSKSTSGGTAALGCLVKDYFPEPVTVSWNSGALTSGVHTFPAVLQSSGLYSLSSVVTVPSSSLGTQTYICNVNHKPSNTKVDKKVEPKSCDKTHTCPPCPAPELLGGPSVFLFPPKPKDTLMISRTPEVTCVVVDVSHEDPEVKFNWYVDGVEVHNAKTKPREEQYNSTYRVVSVLTVLHQDWLNGKEYKCKVSNKALPAPIEKTISKAKGQPREPQVYTLPPCRDELTKNQVSLWCLVKGFYPSDIAVEWESNGQPENNYKTTPPVLDSDGSFFLYSKLTVDKSRWQQGNVFSCSVMHEALHNHYTQKSLSLSPG

SEQ ID NO: 4735 - protein, 606 aa, synthetic construct
  REGION 1..606: note = R_VH-CH1/CLD201/hole/SSDA/RF
QVQLQQPGAELVKPGASVKMSCKASGYTFTSYNMHWVKQTPGRGLEWIGAIYPGNGDTSYNQKFKGKATLTADKSSSTAYMQLSSLTSEDSAVYYCARSTYYGGDWYFNVWGAGTTVTVSAASTKGPSVFPLAPSSKSTSGGTAALGCLVKDYFPEPVTVSWNSGALTSGVHTFPAVLQSSGLYSLSSVVTVPSSSLGTQTYICNVNHKPSNTKVDKKVEPKSCTDWSPYADQSIKVRISLKSALGDKAYEWNDNEMYLFRSSVAYAMRQYFLKVKNQMILFGEEDVRVANLKPRISFNFFVTAPKNVSDIIPRTEVEKAIRMSRSRINDAFRLNDNSLEFLGIQPTLGPPNQPPVSTSTSPTRSMAPGAVHLPQPVSTRDKTHTCPPCPAPELLGGPDVFLFPPKPKDTLMISRTPEVTCVVVDVSHEDPEVKFNWYVDGVEVHNAKTKPREEQYNATYRVVSVLTVLHQDWLNGKEYKCKVSNKALPAPIEKTISKAKGQPREPQVCTLPPSRDELTKNQVSLSCAVKGFYPSDIAVEWESNGQPENNYKTTPPVLDSDGSFFLVSKLTVDKSRWQQGNVFSCSVMHEALHNRFTQKSLSLSPG

SEQ ID NO: 4736 - protein, 450 aa, synthetic construct
  REGION 1..450: note = R_VH-CH1/knob/AILE
QVQLQQPGAELVKPGASVKMSCKASGYTFTSYNMHWVKQTPGRGLEWIGAIYPGNGDTSYNQKFKGKATLTADKSSSTAYMQLSSLTSEDSAVYYCARSTYYGGDWYFNVWGAGTTVTVSAASTKGPSVFPLAPSSKSTSGGTAALGCLVKDYFPEPVTVSWNSGALTSGVHTFPAVLQSSGLYSLSSVVTVPSSSLGTQTYICNVNHKPSNTKVDKKVEPKSCDKTHTCPPCPAPELLGGPSVFLFPPKPKDTLMISRTPEVTCVVVDVSHEDPEVKFNWYVDGVEVHNAKTKPREEQYNSTYRVVSVLTVLHQDWLNGKEYKCKVSNKALPLPEEKTISKAKGQPREPQVYTLPPCRDELTKNQVSLWCLVKGFYPSDIAVEWESNGQPENNYKTTPPVLDSDGSFFLYSKLTVDKSRWQQGNVFSCSVMHEALHNHYTQKSLSLSPG

SEQ ID NO: 4737 - protein, 606 aa, synthetic construct
  REGION 1..606: note = R_VH-CH1/CLD201/hole/AILE/RF
QVQLQQPGAELVKPGASVKMSCKASGYTFTSYNMHWVKQTPGRGLEWIGAIYPGNGDTSYNQKFKGKATLTADKSSSTAYMQLSSLTSEDSAVYYCARSTYYGGDWYFNVWGAGTTVTVSAASTKGPSVFPLAPSSKSTSGGTAALGCLVKDYFPEPVTVSWNSGALTSGVHTFPAVLQSSGLYSLSSVVTVPSSSLGTQTYICNVNHKPSNTKVDKKVEPKSCTDWSPYADQSIKVRISLKSALGDKAYEWNDNEMYLFRSSVAYAMRQYFLKVKNQMILFGEEDVRVANLKPRISFNFFVTAPKNVSDIIPRTEVEKAIRMSRSRINDAFRLNDNSLEFLGIQPTLGPPNQPPVSTSTSPTRSMAPGAVHLPQPVSTRDKTHTCPPCPAPELLGGPSVFLFPPKPKDTLMISRTPEVTCVVVDVSHEDPEVKFNWYVDGVEVHNAKTKPREEQYNSTYRVVSVLTVLHQDWLNGKEYKCKVSNKALPLPEEKTISKAKGQPREPQVCTLPPSRDELTKNQVSLSCAVKGFYPSDIAVEWESNGQPENNYKTTPPVLDSDGSFFLVSKLTVDKSRWQQGNVFSCSVMHEALHNRFTQKSLSLSPG

SEQ ID NO: 4738 - protein, 450 aa, synthetic construct
  REGION 1..450: note = R_VH-CH1/knob/SSDA
QVQLQQPGAELVKPGASVKMSCKASGYTFTSYNMHWVKQTPGRGLEWIGAIYPGNGDTSYNQKFKGKATLTADKSSSTAYMQLSSLTSEDSAVYYCARSTYYGGDWYFNVWGAGTTVTVSAASTKGPSVFPLAPSSKSTSGGTAALGCLVKDYFPEPVTVSWNSGALTSGVHTFPAVLQSSGLYSLSSVVTVPSSSLGTQTYICNVNHKPSNTKVDKKVEPKSCDKTHTCPPCPAPELLGGPDVFLFPPKPKDTLMISRTPEVTCVVVDVSHEDPEVKFNWYVDGVEVHNAKTKPREEQYNATYRVVSVLTVLHQDWLNGKEYKCKVSNKALPAPIEKTISKAKGQPREPQVYTLPPCRDELTKNQVSLWCLVKGFYPSDIAVEWESNGQPENNYKTTPPVLDSDGSFFLYSKLTVDKSRWQQGNVFSCSVMHEALHNHYTQKSLSLSPG

SEQ ID NO: 4739 - protein, 606 aa, synthetic construct
  REGION 1..606: note = R_VH-CH1/CLD201/hole/SIDE/RF
QVQLQQPGAELVKPGASVKMSCKASGYTFTSYNMHWVKQTPGRGLEWIGAIYPGNGDTSYNQKFKGKATLTADKSSSTAYMQLSSLTSEDSAVYYCARSTYYGGDWYFNVWGAGTTVTVSAASTKGPSVFPLAPSSKSTSGGTAALGCLVKDYFPEPVTVSWNSGALTSGVHTFPAVLQSSGLYSLSSVVTVPSSSLGTQTYICNVNHKPSNTKVDKKVEPKSCTDWSPYADQSIKVRISLKSALGDKAYEWNDNEMYLFRSSVAYAMRQYFLKVKNQMILFGEEDVRVANLKPRISFNFFVTAPKNVSDIIPRTEVEKAIRMSRSRINDAFRLNDNSLEFLGIQPTLGPPNQPPVSTSTSPTRSMAPGAVHLPQPVSTRDKTHTCPPCPAPELLGGPDVFLFPPKPKDTLMISRTPEVTCVVVDVSHEDPEVKFNWYVDGVEVHNAKTKPREEQYNSTYRVVSVLTVLHQDWLNGKEYKCKVSNKALPAPEEKTISKAKGQPREPQVCTLPPSRDELTKNQVSLSCAVKGFYPSDIAVEWESNGQPENNYKTTPPVLDSDGSFFLVSKLTVDKSRWQQGNVFSCSVMHEALHNRFTQKSLSLSPG

SEQ ID NO: 4740 - protein, 450 aa, synthetic construct
  REGION 1..450: note = R_VH-CH1/knob/SIDE
QVQLQQPGAELVKPGASVKMSCKASGYTFTSYNMHWVKQTPGRGLEWIGAIYPGNGDTSYNQKFKGKATLTADKSSSTAYMQLSSLTSEDSAVYYCARSTYYGGDWYFNVWGAGTTVTVSAASTKGPSVFPLAPSSKSTSGGTAALGCLVKDYFPEPVTVSWNSGALTSGVHTFPAVLQSSGLYSLSSVVTVPSSSLGTQTYICNVNHKPSNTKVDKKVEPKSCDKTHTCPPCPAPELLGGPDVFLFPPKPKDTLMISRTPEVTCVVVDVSHEDPEVKFNWYVDGVEVHNAKTKPREEQYNSTYRVVSVLTVLHQDWLNGKEYKCKVSNKALPAPEEKTISKAKGQPREPQVYTLPPCRDELTKNQVSLWCLVKGFYPSDIAVEWESNGQPENNYKTTPPVLDSDGSFFLYSKLTVDKSRWQQGNVFSCSVMHEALHNHYTQKSLSLSPG

SEQ ID NO: 4741 - protein, 449 aa, synthetic construct
  REGION 1..449: note = FMC63_VH-CH/N84S
EVKLQESGPGLVAPSQSLSVTCTVSGVSLPDYGVSWIRQPPRKGLEWLGVIWGSETTYYNSALKSRLTIIKDNSKSQVFLKMSSLQTDDTAIYYCAKHYYYGGSYAMDYWGQGTSVTVSSASTKGPSVFPLAPSSKSTSGGTAALGCLVKDYFPEPVTVSWNSGALTSGVHTFPAVLQSSGLYSLSSVVTVPSSSLGTQTYICNVNHKPSNTKVDKKAEPKSCDKTHTCPPCPAPELLGGPSVFLFPPKPKDTLMISRTPEVTCVVVDVSHEDPEVKFNWYVDGVEVHNAKTKPREEQYNSTYRVVSVLTVLHQDWLNGKEYKCKVSNKALPAPIEKTISKAKGQPREPQVYTLPPSRDELTKNQVSLTCLVKGFYPSDIAVEWESNGQPENNYKTTPPVLDSDGSFFLYSKLTVDKSRWQQGNVFSCSVMHEALHNHYTQKSLSLSPG

SEQ ID NO: 4742 - protein, 449 aa, synthetic construct
  REGION 1..449: note = FMC63_VH-CH/N84S/SIDE
EVKLQESGPGLVAPSQSLSVTCTVSGVSLPDYGVSWIRQPPRKGLEWLGVIWGSETTYYNSALKSRLTIIKDNSKSQVFLKMSSLQTDDTAIYYCAKHYYYGGSYAMDYWGQGTSVTVSSASTKGPSVFPLAPSSKSTSGGTAALGCLVKDYFPEPVTVSWNSGALTSGVHTFPAVLQSSGLYSLSSVVTVPSSSLGTQTYICNVNHKPSNTKVDKKAEPKSCDKTHTCPPCPAPELLGGPDVFLFPPKPKDTLMISRTPEVTCVVVDVSHEDPEVKFNWYVDGVEVHNAKTKPREEQYNSTYRVVSVLTVLHQDWLNGKEYKCKVSNKALPAPEEKTISKAKGQPREPQVYTLPPSRDELTKNQVSLTCLVKGFYPSDIAVEWESNGQPENNYKTTPPVLDSDGSFFLYSKLTVDKSRWQQGNVFSCSVMHEALHNHYTQKSLSLSPG

SEQ ID NO: 4743 - protein, 605 aa, synthetic construct
  REGION 1..605: note = FMC63_VH-CH1/N84S/CLD201/hole/RF
EVKLQESGPGLVAPSQSLSVTCTVSGVSLPDYGVSWIRQPPRKGLEWLGVIWGSETTYYNSALKSRLTIIKDNSKSQVFLKMSSLQTDDTAIYYCAKHYYYGGSYAMDYWGQGTSVTVSSASTKGPSVFPLAPSSKSTSGGTAALGCLVKDYFPEPVTVSWNSGALTSGVHTFPAVLQSSGLYSLSSVVTVPSSSLGTQTYICNVNHKPSNTKVDKKVEPKSCTDWSPYADQSIKVRISLKSALGDKAYEWNDNEMYLFRSSVAYAMRQYFLKVKNQMILFGEEDVRVANLKPRISFNFFVTAPKNVSDIIPRTEVEKAIRMSRSRINDAFRLNDNSLEFLGIQPTLGPPNQPPVSTSTSPTRSMAPGAVHLPQPVSTRDKTHTCPPCPAPELLGGPSVFLFPPKPKDTLMISRTPEVTCVVVDVSHEDPEVKFNWYVDGVEVHNAKTKPREEQYNSTYRVVSVLTVLHQDWLNGKEYKCKVSNKALPAPIEKTISKAKGQPREPQVCTLPPSRDELTKNQVSLSCAVKGFYPSDIAVEWESNGQPENNYKTTPPVLDSDGSFFLVSKLTVDKSRWQQGNVFSCSVMHEALHNRFTQKSLSLSPG

SEQ ID NO: 4744 - protein, 449 aa, synthetic construct
  REGION 1..449: note = FMC63_VH-CH1/N84S/knob
EVKLQESGPGLVAPSQSLSVTCTVSGVSLPDYGVSWIRQPPRKGLEWLGVIWGSETTYYNSALKSRLTIIKDNSKSQVFLKMSSLQTDDTAIYYCAKHYYYGGSYAMDYWGQGTSVTVSSASTKGPSVFPLAPSSKSTSGGTAALGCLVKDYFPEPVTVSWNSGALTSGVHTFPAVLQSSGLYSLSSVVTVPSSSLGTQTYICNVNHKPSNTKVDKKVEPKSCDKTHTCPPCPAPELLGGPSVFLFPPKPKDTLMISRTPEVTCVVVDVSHEDPEVKFNWYVDGVEVHNAKTKPREEQYNSTYRVVSVLTVLHQDWLNGKEYKCKVSNKALPAPIEKTISKAKGQPREPQVYTLPPCRDELTKNQVSLWCLVKGFYPSDIAVEWESNGQPENNYKTTPPVLDSDGSFFLYSKLTVDKSRWQQGNVFSCSVMHEALHNHYTQKSLSLSPG

SEQ ID NO: 4745 - protein, 605 aa, synthetic construct
  REGION 1..605: note = FMC63_VH-CH1/N84S/CLD201/hole/SSDA/RF
EVKLQESGPGLVAPSQSLSVTCTVSGVSLPDYGVSWIRQPPRKGLEWLGVIWGSETTYYNSALKSRLTIIKDNSKSQVFLKMSSLQTDDTAIYYCAKHYYYGGSYAMDYWGQGTSVTVSSASTKGPSVFPLAPSSKSTSGGTAALGCLVKDYFPEPVTVSWNSGALTSGVHTFPAVLQSSGLYSLSSVVTVPSSSLGTQTYICNVNHKPSNTKVDKKVEPKSCTDWSPYADQSIKVRISLKSALGDKAYEWNDNEMYLFRSSVAYAMRQYFLKVKNQMILFGEEDVRVANLKPRISFNFFVTAPKNVSDIIPRTEVEKAIRMSRSRINDAFRLNDNSLEFLGIQPTLGPPNQPPVSTSTSPTRSMAPGAVHLPQPVSTRDKTHTCPPCPAPELLGGPDVFLFPPKPKDTLMISRTPEVTCVVVDVSHEDPEVKFNWYVDGVEVHNAKTKPREEQYNATYRVVSVLTVLHQDWLNGKEYKCKVSNKALPAPIEKTISKAKGQPREPQVCTLPPSRDELTKNQVSLSCAVKGFYPSDIAVEWESNGQPENNYKTTPPVLDSDGSFFLVSKLTVDKSRWQQGNVFSCSVMHEALHNRFTQKSLSLSPG

SEQ ID NO: 4746 - protein, 449 aa, synthetic construct
  REGION 1..449: note = FMC63_VH-CH1/N84S/knob/AILE
EVKLQESGPGLVAPSQSLSVTCTVSGVSLPDYGVSWIRQPPRKGLEWLGVIWGSETTYYNSALKSRLTIIKDNSKSQVFLKMSSLQTDDTAIYYCAKHYYYGGSYAMDYWGQGTSVTVSSASTKGPSVFPLAPSSKSTSGGTAALGCLVKDYFPEPVTVSWNSGALTSGVHTFPAVLQSSGLYSLSSVVTVPSSSLGTQTYICNVNHKPSNTKVDKKVEPKSCDKTHTCPPCPAPELLGGPSVFLFPPKPKDTLMISRTPEVTCVVVDVSHEDPEVKFNWYVDGVEVHNAKTKPREEQYNSTYRVVSVLTVLHQDWLNGKEYKCKVSNKALPLPEEKTISKAKGQPREPQVYTLPPCRDELTKNQVSLWCLVKGFYPSDIAVEWESNGQPENNYKTTPPVLDSDGSFFLYSKLTVDKSRWQQGNVFSCSVMHEALHNHYTQKSLSLSPG

SEQ ID NO: 4747 - protein, 605 aa, synthetic construct
  REGION 1..605: note = FMC63_VH-CH1/N84S/CLD201/hole/AILE/RF
EVKLQESGPGLVAPSQSLSVTCTVSGVSLPDYGVSWIRQPPRKGLEWLGVIWGSETTYYNSALKSRLTIIKDNSKSQVFLKMSSLQTDDTAIYYCAKHYYYGGSYAMDYWGQGTSVTVSSASTKGPSVFPLAPSSKSTSGGTAALGCLVKDYFPEPVTVSWNSGALTSGVHTFPAVLQSSGLYSLSSVVTVPSSSLGTQTYICNVNHKPSNTKVDKKVEPKSCTDWSPYADQSIKVRISLKSALGDKAYEWNDNEMYLFRSSVAYAMRQYFLKVKNQMILFGEEDVRVANLKPRISFNFFVTAPKNVSDIIPRTEVEKAIRMSRSRINDAFRLNDNSLEFLGIQPTLGPPNQPPVSTSTSPTRSMAPGAVHLPQPVSTRDKTHTCPPCPAPELLGGPSVFLFPPKPKDTLMISRTPEVTCVVVDVSHEDPEVKFNWYVDGVEVHNAKTKPREEQYNSTYRVVSVLTVLHQDWLNGKEYKCKVSNKALPLPEEKTISKAKGQPREPQVCTLPPSRDELTKNQVSLSCAVKGFYPSDIAVEWESNGQPENNYKTTPPVLDSDGSFFLVSKLTVDKSRWQQGNVFSCSVMHEALHNRFTQKSLSLSPG

SEQ ID NO: 4748 - protein, 449 aa, synthetic construct
  REGION 1..449: note = FMC63_VH-CH1/N84S/knob/SSDA
EVKLQESGPGLVAPSQSLSVTCTVSGVSLPDYGVSWIRQPPRKGLEWLGVIWGSETTYYNSALKSRLTIIKDNSKSQVFLKMSSLQTDDTAIYYCAKHYYYGGSYAMDYWGQGTSVTVSSASTKGPSVFPLAPSSKSTSGGTAALGCLVKDYFPEPVTVSWNSGALTSGVHTFPAVLQSSGLYSLSSVVTVPSSSLGTQTYICNVNHKPSNTKVDKKVEPKSCDKTHTCPPCPAPELLGGPDVFLFPPKPKDTLMISRTPEVTCVVVDVSHEDPEVKFNWYVDGVEVHNAKTKPREEQYNATYRVVSVLTVLHQDWLNGKEYKCKVSNKALPAPIEKTISKAKGQPREPQVYTLPPCRDELTKNQVSLWCLVKGFYPSDIAVEWESNGQPENNYKTTPPVLDSDGSFFLYSKLTVDKSRWQQGNVFSCSVMHEALHNHYTQKSLSLSPG

SEQ ID NO: 4749 - protein, 605 aa, synthetic construct
  REGION 1..605: note = FMC63_VH-CH1/N84S/CLD201/hole/SIDE/RF
EVKLQESGPGLVAPSQSLSVTCTVSGVSLPDYGVSWIRQPPRKGLEWLGVIWGSETTYYNSALKSRLTIIKDNSKSQVFLKMSSLQTDDTAIYYCAKHYYYGGSYAMDYWGQGTSVTVSSASTKGPSVFPLAPSSKSTSGGTAALGCLVKDYFPEPVTVSWNSGALTSGVHTFPAVLQSSGLYSLSSVVTVPSSSLGTQTYICNVNHKPSNTKVDKKVEPKSCTDWSPYADQSIKVRISLKSALGDKAYEWNDNEMYLFRSSVAYAMRQYFLKVKNQMILFGEEDVRVANLKPRISFNFFVTAPKNVSDIIPRTEVEKAIRMSRSRINDAFRLNDNSLEFLGIQPTLGPPNQPPVSTSTSPTRSMAPGAVHLPQPVSTRDKTHTCPPCPAPELLGGPDVFLFPPKPKDTLMISRTPEVTCVVVDVSHEDPEVKFNWYVDGVEVHNAKTKPREEQYNSTYRVVSVLTVLHQDWLNGKEYKCKVSNKALPAPEEKTISKAKGQPREPQVCTLPPSRDELTKNQVSLSCAVKGFYPSDIAVEWESNGQPENNYKTTPPVLDSDGSFFLVSKLTVDKSRWQQGNVFSCSVMHEALHNRFTQKSLSLSPG

SEQ ID NO: 4750 - protein, 449 aa, synthetic construct
  REGION 1..449: note = FMC63_VH-CH1/N84S/knob/SIDE
EVKLQESGPGLVAPSQSLSVTCTVSGVSLPDYGVSWIRQPPRKGLEWLGVIWGSETTYYNSALKSRLTIIKDNSKSQVFLKMSSLQTDDTAIYYCAKHYYYGGSYAMDYWGQGTSVTVSSASTKGPSVFPLAPSSKSTSGGTAALGCLVKDYFPEPVTVSWNSGALTSGVHTFPAVLQSSGLYSLSSVVTVPSSSLGTQTYICNVNHKPSNTKVDKKVEPKSCDKTHTCPPCPAPELLGGPDVFLFPPKPKDTLMISRTPEVTCVVVDVSHEDPEVKFNWYVDGVEVHNAKTKPREEQYNSTYRVVSVLTVLHQDWLNGKEYKCKVSNKALPAPEEKTISKAKGQPREPQVYTLPPCRDELTKNQVSLWCLVKGFYPSDIAVEWESNGQPENNYKTTPPVLDSDGSFFLYSKLTVDKSRWQQGNVFSCSVMHEALHNHYTQKSLSLSPG

SEQ ID NO: 4751 - protein, 438 aa, synthetic construct
  REGION 1..438: note = FMC60_VK-x-CH1/Q38E/S183K/knob
DIQMTQSPSSLSASVGDRVTITCRASQDISKFLNWYQEKPGKAIKLLIYHTSRLHSGVPSRFSGSGSGTDFTLTISSLQPEDFATYYCQQGATLPYTFGPGTKVEIKSSASTKGPSVFPLAPSSKSTSGGTAALGCLVKDYFPEPVTVSWNSGALTSGVHTFPAVLQSSGLYSLKSVVTVPSSSLGTQTYICNVNHKPSNTKVDKKVEPKSCDKTHTCPPCPAPELLGGPSVFLFPPKPKDTLMISRTPEVTCVVVDVSHEDPEVKFNWYVDGVEVHNAKTKPREEQYNSTYRVVSVLTVLHQDWLNGKEYKCKVSNKALPAPIEKTISKAKGQPREPQVYTLPPCRDELTKNQVSLWCLVKGFYPSDIAVEWESNGQPENNYKTTPPVLDSDGSFFLYSKLTVDKSRWQQGNVFSCSVMHEALHNHYTQKSLSLSPG

SEQ ID NO: 4752 - protein, 438 aa, synthetic construct
  REGION 1..438: note = FMC60_VK-x-CH1/Q38K/S183K/knob
DIQMTQSPSSLSASVGDRVTITCRASQDISKFLNWYQKKPGKAIKLLIYHTSRLHSGVPSRFSGSGSGTDFTLTISSLQPEDFATYYCQQGATLPYTFGPGTKVEIKSSASTKGPSVFPLAPSSKSTSGGTAALGCLVKDYFPEPVTVSWNSGALTSGVHTFPAVLQSSGLYSLKSVVTVPSSSLGTQTYICNVNHKPSNTKVDKKVEPKSCDKTHTCPPCPAPELLGGPSVFLFPPKPKDTLMISRTPEVTCVVVDVSHEDPEVKFNWYVDGVEVHNAKTKPREEQYNSTYRVVSVLTVLHQDWLNGKEYKCKVSNKALPAPIEKTISKAKGQPREPQVYTLPPCRDELTKNQVSLWCLVKGFYPSDIAVEWESNGQPENNYKTTPPVLDSDGSFFLYSKLTVDKSRWQQGNVFSCSVMHEALHNHYTQKSLSLSPG

SEQ ID NO: 4753 - protein, 606 aa, synthetic construct
  REGION 1..606: note = R_VH-CH1/Q39E/S183E/CLD201/hole/RF
QVQLQQPGAELVKPGASVKMSCKASGYTFTSYNMHWVKETPGRGLEWIGAIYPGNGDTSYNQKFKGKATLTADKSSSTAYMQLSSLTSEDSAVYYCARSTYYGGDWYFNVWGAGTTVTVSAASTKGPSVFPLAPSSKSTSGGTAALGCLVKDYFPEPVTVSWNSGALTSGVHTFPAVLQSSGLYSLESVVTVPSSSLGTQTYICNVNHKPSNTKVDKKVEPKSCTDWSPYADQSIKVRISLKSALGDKAYEWNDNEMYLFRSSVAYAMRQYFLKVKNQMILFGEEDVRVANLKPRISFNFFVTAPKNVSDIIPRTEVEKAIRMSRSRINDAFRLNDNSLEFLGIQPTLGPPNQPPVSTSTSPTRSMAPGAVHLPQPVSTRDKTHTCPPCPAPELLGGPSVFLFPPKPKDTLMISRTPEVTCVVVDVSHEDPEVKFNWYVDGVEVHNAKTKPREEQYNSTYRVVSVLTVLHQDWLNGKEYKCKVSNKALPAPIEKTISKAKGQPREPQVCTLPPSRDELTKNQVSLSCAVKGFYPSDIAVEWESNGQPENNYKTTPPVLDSDGSFFLVSKLTVDKSRWQQGNVFSCSVMHEALHNRFTQKSLSLSPG

SEQ ID NO: 4754 - protein, 605 aa, synthetic construct
  REGION 1..605: note = FMC47_VH-CH1/N84S/Q39K/S183E/CLD201/hole/RF
QVQLVQSGGGVVQPGRSLRLSCAASGVSLPDYGVSWVRKAPGKGLEWVAVIWGSETTYYNSALKSRFTISRDNSKNTLYLQMSSLRAEDTAVYYCAKHYYYGGSFAMDYWGQGTLVTVSSASTKGPSVFPLAPSSKSTSGGTAALGCLVKDYFPEPVTVSWNSGALTSGVHTFPAVLQSSGLYSLESVVTVPSSSLGTQTYICNVNHKPSNTKVDKKVEPKSCTDWSPYADQSIKVRISLKSALGDKAYEWNDNEMYLFRSSVAYAMRQYFLKVKNQMILFGEEDVRVANLKPRISFNFFVTAPKNVSDIIPRTEVEKAIRMSRSRINDAFRLNDNSLEFLGIQPTLGPPNQPPVSTSTSPTRSMAPGAVHLPQPVSTRDKTHTCPPCPAPELLGGPSVFLFPPKPKDTLMISRTPEVTCVVVDVSHEDPEVKFNWYVDGVEVHNAKTKPREEQYNSTYRVVSVLTVLHQDWLNGKEYKCKVSNKALPAPIEKTISKAKGQPREPQVCTLPPSRDELTKNQVSLSCAVKGFYPSDIAVEWESNGQPENNYKTTPPVLDSDGSFFLVSKLTVDKSRWQQGNVFSCSVMHEALHNRFTQKSLSLSPG

SEQ ID NO: 4755 - protein, 605 aa, synthetic construct
  REGION 1..605: note = FMC47_VH-CH1/N84S/Q39E/S183E/CLD201/hole/RF
QVQLVQSGGGVVQPGRSLRLSCAASGVSLPDYGVSWVREAPGKGLEWVAVIWGSETTYYNSALKSRFTISRDNSKNTLYLQMSSLRAEDTAVYYCAKHYYYGGSFAMDYWGQGTLVTVSSASTKGPSVFPLAPSSKSTSGGTAALGCLVKDYFPEPVTVSWNSGALTSGVHTFPAVLQSSGLYSLESVVTVPSSSLGTQTYICNVNHKPSNTKVDKKVEPKSCTDWSPYADQSIKVRISLKSALGDKAYEWNDNEMYLFRSSVAYAMRQYFLKVKNQMILFGEEDVRVANLKPRISFNFFVTAPKNVSDIIPRTEVEKAIRMSRSRINDAFRLNDNSLEFLGIQPTLGPPNQPPVSTSTSPTRSMAPGAVHLPQPVSTRDKTHTCPPCPAPELLGGPSVFLFPPKPKDTLMISRTPEVTCVVVDVSHEDPEVKFNWYVDGVEVHNAKTKPREEQYNSTYRVVSVLTVLHQDWLNGKEYKCKVSNKALPAPIEKTISKAKGQPREPQVCTLPPSRDELTKNQVSLSCAVKGFYPSDIAVEWESNGQPENNYKTTPPVLDSDGSFFLVSKLTVDKSRWQQGNVFSCSVMHEALHNRFTQKSLSLSPG

SEQ ID NO: 4756 - protein, 606 aa, synthetic construct
  REGION 1..606: note = R_VH-CH1/Q39K/S183E/CLD201/hole/SD/RF
QVQLQQPGAELVKPGASVKMSCKASGYTFTSYNMHWVKKTPGRGLEWIGAIYPGNGDTSYNQKFKGKATLTADKSSSTAYMQLSSLTSEDSAVYYCARSTYYGGDWYFNVWGAGTTVTVSAASTKGPSVFPLAPSSKSTSGGTAALGCLVKDYFPEPVTVSWNSGALTSGVHTFPAVLQSSGLYSLESVVTVPSSSLGTQTYICNVNHKPSNTKVDKKVEPKSCTDWSPYADQSIKVRISLKSALGDKAYEWNDNEMYLFRSSVAYAMRQYFLKVKNQMILFGEEDVRVANLKPRISFNFFVTAPKNVSDIIPRTEVEKAIRMSRSRINDAFRLNDNSLEFLGIQPTLGPPNQPPVSTSTSPTRSMAPGAVHLPQPVSTRDKTHTCPPCPAPELLGGPDVFLFPPKPKDTLMISRTPEVTCVVVDVSHEDPEVKFNWYVDGVEVHNAKTKPREEQYNSTYRVVSVLTVLHQDWLNGKEYKCKVSNKALPAPIEKTISKAKGQPREPQVCTLPPSRDELTKNQVSLSCAVKGFYPSDIAVEWESNGQPENNYKTTPPVLDSDGSFFLVSKLTVDKSRWQQGNVFSCSVMHEALHNRFTQKSLSLSPG

SEQ ID NO: 4757 - protein, 438 aa, synthetic construct
  REGION 1..438: note = FMC60_VK-x-CH1/Q38E/S183K/knob/IE
DIQMTQSPSSLSASVGDRVTITCRASQDISKFLNWYQEKPGKAIKLLIYHTSRLHSGVPSRFSGSGSGTDFTLTISSLQPEDFATYYCQQGATLPYTFGPGTKVEIKSSASTKGPSVFPLAPSSKSTSGGTAALGCLVKDYFPEPVTVSWNSGALTSGVHTFPAVLQSSGLYSLKSVVTVPSSSLGTQTYICNVNHKPSNTKVDKKVEPKSCDKTHTCPPCPAPELLGGPSVFLFPPKPKDTLMISRTPEVTCVVVDVSHEDPEVKFNWYVDGVEVHNAKTKPREEQYNSTYRVVSVLTVLHQDWLNGKEYKCKVSNKALPAPEEKTISKAKGQPREPQVYTLPPCRDELTKNQVSLWCLVKGFYPSDIAVEWESNGQPENNYKTTPPVLDSDGSFFLYSKLTVDKSRWQQGNVFSCSVMHEALHNHYTQKSLSLSPG

SEQ ID NO: 4758 - protein, 438 aa, synthetic construct
  REGION 1..438: note = FMC60_VK-x-CH1/Q38K/S183K/knob/IE
DIQMTQSPSSLSASVGDRVTITCRASQDISKFLNWYQKKPGKAIKLLIYHTSRLHSGVPSRFSGSGSGTDFTLTISSLQPEDFATYYCQQGATLPYTFGPGTKVEIKSSASTKGPSVFPLAPSSKSTSGGTAALGCLVKDYFPEPVTVSWNSGALTSGVHTFPAVLQSSGLYSLKSVVTVPSSSLGTQTYICNVNHKPSNTKVDKKVEPKSCDKTHTCPPCPAPELLGGPSVFLFPPKPKDTLMISRTPEVTCVVVDVSHEDPEVKFNWYVDGVEVHNAKTKPREEQYNSTYRVVSVLTVLHQDWLNGKEYKCKVSNKALPAPEEKTISKAKGQPREPQVYTLPPCRDELTKNQVSLWCLVKGFYPSDIAVEWESNGQPENNYKTTPPVLDSDGSFFLYSKLTVDKSRWQQGNVFSCSVMHEALHNHYTQKSLSLSPG

SEQ ID NO: 4759 - protein, 606 aa, synthetic construct
  REGION 1..606: note = R_VH-CH1/Q39E/S183E/CLD201/hole/SD/RF
QVQLQQPGAELVKPGASVKMSCKASGYTFTSYNMHWVKETPGRGLEWIGAIYPGNGDTSYNQKFKGKATLTADKSSSTAYMQLSSLTSEDSAVYYCARSTYYGGDWYFNVWGAGTTVTVSAASTKGPSVFPLAPSSKSTSGGTAALGCLVKDYFPEPVTVSWNSGALTSGVHTFPAVLQSSGLYSLESVVTVPSSSLGTQTYICNVNHKPSNTKVDKKVEPKSCTDWSPYADQSIKVRISLKSALGDKAYEWNDNEMYLFRSSVAYAMRQYFLKVKNQMILFGEEDVRVANLKPRISFNFFVTAPKNVSDIIPRTEVEKAIRMSRSRINDAFRLNDNSLEFLGIQPTLGPPNQPPVSTSTSPTRSMAPGAVHLPQPVSTRDKTHTCPPCPAPELLGGPDVFLFPPKPKDTLMISRTPEVTCVVVDVSHEDPEVKFNWYVDGVEVHNAKTKPREEQYNSTYRVVSVLTVLHQDWLNGKEYKCKVSNKALPAPIEKTISKAKGQPREPQVCTLPPSRDELTKNQVSLSCAVKGFYPSDIAVEWESNGQPENNYKTTPPVLDSDGSFFLVSKLTVDKSRWQQGNVFSCSVMHEALHNRFTQKSLSLSPG

SEQ ID NO: 4760 - protein, 605 aa, synthetic construct
  REGION 1..605: note = FMC47_VH-CH1/N84S/Q39K/S183E/CLD201/hole/SD/RF
QVQLVQSGGGVVQPGRSLRLSCAASGVSLPDYGVSWVRKAPGKGLEWVAVIWGSETTYYNSALKSRFTISRDNSKNTLYLQMSSLRAEDTAVYYCAKHYYYGGSFAMDYWGQGTLVTVSSASTKGPSVFPLAPSSKSTSGGTAALGCLVKDYFPEPVTVSWNSGALTSGVHTFPAVLQSSGLYSLESVVTVPSSSLGTQTYICNVNHKPSNTKVDKKVEPKSCTDWSPYADQSIKVRISLKSALGDKAYEWNDNEMYLFRSSVAYAMRQYFLKVKNQMILFGEEDVRVANLKPRISFNFFVTAPKNVSDIIPRTEVEKAIRMSRSRINDAFRLNDNSLEFLGIQPTLGPPNQPPVSTSTSPTRSMAPGAVHLPQPVSTRDKTHTCPPCPAPELLGGPDVFLFPPKPKDTLMISRTPEVTCVVVDVSHEDPEVKFNWYVDGVEVHNAKTKPREEQYNSTYRVVSVLTVLHQDWLNGKEYKCKVSNKALPAPIEKTISKAKGQPREPQVCTLPPSRDELTKNQVSLSCAVKGFYPSDIAVEWESNGQPENNYKTTPPVLDSDGSFFLVSKLTVDKSRWQQGNVFSCSVMHEALHNRFTQKSLSLSPG

SEQ ID NO: 4761 - protein, 437 aa, synthetic construct
  REGION 1..437: note = R_VK-x-CH1/Q38E/S183K/knob/IE
QIVLSQSPAILSASPGEKVTMTCRASSSVSYIHWFQEKPGSSPKPWIYATSNLASGVPVRFSGSGSGTSYSLTISRVEAEDAATYYCQQWTSNPPTFGGGTKVEIKSSASTKGPSVFPLAPSSKSTSGGTAALGCLVKDYFPEPVTVSWNSGALTSGVHTFPAVLQSSGLYSLKSVVTVPSSSLGTQTYICNVNHKPSNTKVDKKVEPKSCDKTHTCPPCPAPELLGGPSVFLFPPKPKDTLMISRTPEVTCVVVDVSHEDPEVKFNWYVDGVEVHNAKTKPREEQYNSTYRVVSVLTVLHQDWLNGKEYKCKVSNKALPAPEEKTISKAKGQPREPQVYTLPPCRDELTKNQVSLWCLVKGFYPSDIAVEWESNGQPENNYKTTPPVLDSDGSFFLYSKLTVDKSRWQQGNVFSCSVMHEALHNHYTQKSLSLSPG

SEQ ID NO: 4762 - protein, 437 aa, synthetic construct
  REGION 1..437: note = R_VK-x-CH1/Q38K/S183K/knob/IE
QIVLSQSPAILSASPGEKVTMTCRASSSVSYIHWFQKKPGSSPKPWIYATSNLASGVPVRFSGSGSGTSYSLTISRVEAEDAATYYCQQWTSNPPTFGGGTKVEIKSSASTKGPSVFPLAPSSKSTSGGTAALGCLVKDYFPEPVTVSWNSGALTSGVHTFPAVLQSSGLYSLKSVVTVPSSSLGTQTYICNVNHKPSNTKVDKKVEPKSCDKTHTCPPCPAPELLGGPSVFLFPPKPKDTLMISRTPEVTCVVVDVSHEDPEVKFNWYVDGVEVHNAKTKPREEQYNSTYRVVSVLTVLHQDWLNGKEYKCKVSNKALPAPEEKTISKAKGQPREPQVYTLPPCRDELTKNQVSLWCLVKGFYPSDIAVEWESNGQPENNYKTTPPVLDSDGSFFLYSKLTVDKSRWQQGNVFSCSVMHEALHNHYTQKSLSLSPG

SEQ ID NO: 4763 - protein, 605 aa, synthetic construct
  REGION 1..605: note = FMC47_VH-CH1/N84S/Q39E/S183E/CLD201/hole/SD/RF
QVQLVQSGGGVVQPGRSLRLSCAASGVSLPDYGVSWVREAPGKGLEWVAVIWGSETTYYNSALKSRFTISRDNSKNTLYLQMSSLRAEDTAVYYCAKHYYYGGSFAMDYWGQGTLVTVSSASTKGPSVFPLAPSSKSTSGGTAALGCLVKDYFPEPVTVSWNSGALTSGVHTFPAVLQSSGLYSLESVVTVPSSSLGTQTYICNVNHKPSNTKVDKKVEPKSCTDWSPYADQSIKVRISLKSALGDKAYEWNDNEMYLFRSSVAYAMRQYFLKVKNQMILFGEEDVRVANLKPRISFNFFVTAPKNVSDIIPRTEVEKAIRMSRSRINDAFRLNDNSLEFLGIQPTLGPPNQPPVSTSTSPTRSMAPGAVHLPQPVSTRDKTHTCPPCPAPELLGGPDVFLFPPKPKDTLMISRTPEVTCVVVDVSHEDPEVKFNWYVDGVEVHNAKTKPREEQYNSTYRVVSVLTVLHQDWLNGKEYKCKVSNKALPAPIEKTISKAKGQPREPQVCTLPPSRDELTKNQVSLSCAVKGFYPSDIAVEWESNGQPENNYKTTPPVLDSDGSFFLVSKLTVDKSRWQQGNVFSCSVMHEALHNRFTQKSLSLSPG

SEQ ID NO: 4764 - protein, 606 aa, synthetic construct
  REGION 1..606: note = R_VH-CH1/Q39K/S183E/CLD201/hole/IE/RF
QVQLQQPGAELVKPGASVKMSCKASGYTFTSYNMHWVKKTPGRGLEWIGAIYPGNGDTSYNQKFKGKATLTADKSSSTAYMQLSSLTSEDSAVYYCARSTYYGGDWYFNVWGAGTTVTVSAASTKGPSVFPLAPSSKSTSGGTAALGCLVKDYFPEPVTVSWNSGALTSGVHTFPAVLQSSGLYSLESVVTVPSSSLGTQTYICNVNHKPSNTKVDKKVEPKSCTDWSPYADQSIKVRISLKSALGDKAYEWNDNEMYLFRSSVAYAMRQYFLKVKNQMILFGEEDVRVANLKPRISFNFFVTAPKNVSDIIPRTEVEKAIRMSRSRINDAFRLNDNSLEFLGIQPTLGPPNQPPVSTSTSPTRSMAPGAVHLPQPVSTRDKTHTCPPCPAPELLGGPSVFLFPPKPKDTLMISRTPEVTCVVVDVSHEDPEVKFNWYVDGVEVHNAKTKPREEQYNSTYRVVSVLTVLHQDWLNGKEYKCKVSNKALPAPEEKTISKAKGQPREPQVCTLPPSRDELTKNQVSLSCAVKGFYPSDIAVEWESNGQPENNYKTTPPVLDSDGSFFLVSKLTVDKSRWQQGNVFSCSVMHEALHNRFTQKSLSLSPG

SEQ ID NO: 4765 - protein, 438 aa, synthetic construct
  REGION 1..438: note = FMC60_VK-x-CH1/Q38E/S183K/knob/SD
DIQMTQSPSSLSASVGDRVTITCRASQDISKFLNWYQEKPGKAIKLLIYHTSRLHSGVPSRFSGSGSGTDFTLTISSLQPEDFATYYCQQGATLPYTFGPGTKVEIKSSASTKGPSVFPLAPSSKSTSGGTAALGCLVKDYFPEPVTVSWNSGALTSGVHTFPAVLQSSGLYSLKSVVTVPSSSLGTQTYICNVNHKPSNTKVDKKVEPKSCDKTHTCPPCPAPELLGGPDVFLFPPKPKDTLMISRTPEVTCVVVDVSHEDPEVKFNWYVDGVEVHNAKTKPREEQYNSTYRVVSVLTVLHQDWLNGKEYKCKVSNKALPAPIEKTISKAKGQPREPQVYTLPPCRDELTKNQVSLWCLVKGFYPSDIAVEWESNGQPENNYKTTPPVLDSDGSFFLYSKLTVDKSRWQQGNVFSCSVMHEALHNHYTQKSLSLSPG

SEQ ID NO: 4766 - protein, 438 aa, synthetic construct
  REGION 1..438: note = FMC60_VK-x-CH1/Q38K/S183K/knob/SD
DIQMTQSPSSLSASVGDRVTITCRASQDISKFLNWYQKKPGKAIKLLIYHTSRLHSGVPSRFSGSGSGTDFTLTISSLQPEDFATYYCQQGATLPYTFGPGTKVEIKSSASTKGPSVFPLAPSSKSTSGGTAALGCLVKDYFPEPVTVSWNSGALTSGVHTFPAVLQSSGLYSLKSVVTVPSSSLGTQTYICNVNHKPSNTKVDKKVEPKSCDKTHTCPPCPAPELLGGPDVFLFPPKPKDTLMISRTPEVTCVVVDVSHEDPEVKFNWYVDGVEVHNAKTKPREEQYNSTYRVVSVLTVLHQDWLNGKEYKCKVSNKALPAPIEKTISKAKGQPREPQVYTLPPCRDELTKNQVSLWCLVKGFYPSDIAVEWESNGQPENNYKTTPPVLDSDGSFFLYSKLTVDKSRWQQGNVFSCSVMHEALHNHYTQKSLSLSPG

SEQ ID NO: 4767 - protein, 606 aa, synthetic construct
  REGION 1..606: note = R_VH-CH1/Q39E/S183E/CLD201/hole/IE/RF
QVQLQQPGAELVKPGASVKMSCKASGYTFTSYNMHWVKETPGRGLEWIGAIYPGNGDTSYNQKFKGKATLTADKSSSTAYMQLSSLTSEDSAVYYCARSTYYGGDWYFNVWGAGTTVTVSAASTKGPSVFPLAPSSKSTSGGTAALGCLVKDYFPEPVTVSWNSGALTSGVHTFPAVLQSSGLYSLESVVTVPSSSLGTQTYICNVNHKPSNTKVDKKVEPKSCTDWSPYADQSIKVRISLKSALGDKAYEWNDNEMYLFRSSVAYAMRQYFLKVKNQMILFGEEDVRVANLKPRISFNFFVTAPKNVSDIIPRTEVEKAIRMSRSRINDAFRLNDNSLEFLGIQPTLGPPNQPPVSTSTSPTRSMAPGAVHLPQPVSTRDKTHTCPPCPAPELLGGPSVFLFPPKPKDTLMISRTPEVTCVVVDVSHEDPEVKFNWYVDGVEVHNAKTKPREEQYNSTYRVVSVLTVLHQDWLNGKEYKCKVSNKALPAPEEKTISKAKGQPREPQVCTLPPSRDELTKNQVSLSCAVKGFYPSDIAVEWESNGQPENNYKTTPPVLDSDGSFFLVSKLTVDKSRWQQGNVFSCSVMHEALHNRFTQKSLSLSPG

SEQ ID NO: 4768 - protein, 605 aa, synthetic construct
  REGION 1..605: note = FMC47_VH-CH1/N84S/Q39K/S183E/CLD201/hole/IE/RF
QVQLVQSGGGVVQPGRSLRLSCAASGVSLPDYGVSWVRKAPGKGLEWVAVIWGSETTYYNSALKSRFTISRDNSKNTLYLQMSSLRAEDTAVYYCAKHYYYGGSFAMDYWGQGTLVTVSSASTKGPSVFPLAPSSKSTSGGTAALGCLVKDYFPEPVTVSWNSGALTSGVHTFPAVLQSSGLYSLESVVTVPSSSLGTQTYICNVNHKPSNTKVDKKVEPKSCTDWSPYADQSIKVRISLKSALGDKAYEWNDNEMYLFRSSVAYAMRQYFLKVKNQMILFGEEDVRVANLKPRISFNFFVTAPKNVSDIIPRTEVEKAIRMSRSRINDAFRLNDNSLEFLGIQPTLGPPNQPPVSTSTSPTRSMAPGAVHLPQPVSTRDKTHTCPPCPAPELLGGPSVFLFPPKPKDTLMISRTPEVTCVVVDVSHEDPEVKFNWYVDGVEVHNAKTKPREEQYNSTYRVVSVLTVLHQDWLNGKEYKCKVSNKALPAPEEKTISKAKGQPREPQVCTLPPSRDELTKNQVSLSCAVKGFYPSDIAVEWESNGQPENNYKTTPPVLDSDGSFFLVSKLTVDKSRWQQGNVFSCSVMHEALHNRFTQKSLSLSPG

SEQ ID NO: 4769 - protein, 437 aa, synthetic construct
  REGION 1..437: note = R_VK-x-CH1/Q38E/S183K/knob/SD
QIVLSQSPAILSASPGEKVTMTCRASSSVSYIHWFQEKPGSSPKPWIYATSNLASGVPVRFSGSGSGTSYSLTISRVEAEDAATYYCQQWTSNPPTFGGGTKVEIKSSASTKGPSVFPLAPSSKSTSGGTAALGCLVKDYFPEPVTVSWNSGALTSGVHTFPAVLQSSGLYSLKSVVTVPSSSLGTQTYICNVNHKPSNTKVDKKVEPKSCDKTHTCPPCPAPELLGGPDVFLFPPKPKDTLMISRTPEVTCVVVDVSHEDPEVKFNWYVDGVEVHNAKTKPREEQYNSTYRVVSVLTVLHQDWLNGKEYKCKVSNKALPAPIEKTISKAKGQPREPQVYTLPPCRDELTKNQVSLWCLVKGFYPSDIAVEWESNGQPENNYKTTPPVLDSDGSFFLYSKLTVDKSRWQQGNVFSCSVMHEALHNHYTQKSLSLSPG

SEQ ID NO: 4770 - protein, 437 aa, synthetic construct
  REGION 1..437: note = R_VK-x-CH1/Q38K/S183K/knob/SD
QIVLSQSPAILSASPGEKVTMTCRASSSVSYIHWFQKKPGSSPKPWIYATSNLASGVPVRFSGSGSGTSYSLTISRVEAEDAATYYCQQWTSNPPTFGGGTKVEIKSSASTKGPSVFPLAPSSKSTSGGTAALGCLVKDYFPEPVTVSWNSGALTSGVHTFPAVLQSSGLYSLKSVVTVPSSSLGTQTYICNVNHKPSNTKVDKKVEPKSCDKTHTCPPCPAPELLGGPDVFLFPPKPKDTLMISRTPEVTCVVVDVSHEDPEVKFNWYVDGVEVHNAKTKPREEQYNSTYRVVSVLTVLHQDWLNGKEYKCKVSNKALPAPIEKTISKAKGQPREPQVYTLPPCRDELTKNQVSLWCLVKGFYPSDIAVEWESNGQPENNYKTTPPVLDSDGSFFLYSKLTVDKSRWQQGNVFSCSVMHEALHNHYTQKSLSLSPG

SEQ ID NO: 4771 - protein, 605 aa, synthetic construct
  REGION 1..605: note = FMC47_VH-CH1/N84S/Q39E/S183E/CLD201/hole/IE/RF
QVQLVQSGGGVVQPGRSLRLSCAASGVSLPDYGVSWVREAPGKGLEWVAVIWGSETTYYNSALKSRFTISRDNSKNTLYLQMSSLRAEDTAVYYCAKHYYYGGSFAMDYWGQGTLVTVSSASTKGPSVFPLAPSSKSTSGGTAALGCLVKDYFPEPVTVSWNSGALTSGVHTFPAVLQSSGLYSLESVVTVPSSSLGTQTYICNVNHKPSNTKVDKKVEPKSCTDWSPYADQSIKVRISLKSALGDKAYEWNDNEMYLFRSSVAYAMRQYFLKVKNQMILFGEEDVRVANLKPRISFNFFVTAPKNVSDIIPRTEVEKAIRMSRSRINDAFRLNDNSLEFLGIQPTLGPPNQPPVSTSTSPTRSMAPGAVHLPQPVSTRDKTHTCPPCPAPELLGGPSVFLFPPKPKDTLMISRTPEVTCVVVDVSHEDPEVKFNWYVDGVEVHNAKTKPREEQYNSTYRVVSVLTVLHQDWLNGKEYKCKVSNKALPAPEEKTISKAKGQPREPQVCTLPPSRDELTKNQVSLSCAVKGFYPSDIAVEWESNGQPENNYKTTPPVLDSDGSFFLVSKLTVDKSRWQQGNVFSCSVMHEALHNRFTQKSLSLSPG

SEQ ID NO: 4772 - protein, 438 aa, synthetic construct
  REGION 1..438: note = FMC60_VK-x-CH1/Q38E/S183K/knob/SIDE
DIQMTQSPSSLSASVGDRVTITCRASQDISKFLNWYQEKPGKAIKLLIYHTSRLHSGVPSRFSGSGSGTDFTLTISSLQPEDFATYYCQQGATLPYTFGPGTKVEIKSSASTKGPSVFPLAPSSKSTSGGTAALGCLVKDYFPEPVTVSWNSGALTSGVHTFPAVLQSSGLYSLKSVVTVPSSSLGTQTYICNVNHKPSNTKVDKKVEPKSCDKTHTCPPCPAPELLGGPDVFLFPPKPKDTLMISRTPEVTCVVVDVSHEDPEVKFNWYVDGVEVHNAKTKPREEQYNSTYRVVSVLTVLHQDWLNGKEYKCKVSNKALPAPEEKTISKAKGQPREPQVYTLPPCRDELTKNQVSLWCLVKGFYPSDIAVEWESNGQPENNYKTTPPVLDSDGSFFLYSKLTVDKSRWQQGNVFSCSVMHEALHNHYTQKSLSLSPG

SEQ ID NO: 4773 - protein, 438 aa, synthetic construct
  REGION 1..438: note = FMC60_VK-x-CH1/Q38K/S183K/knob/SIDE
DIQMTQSPSSLSASVGDRVTITCRASQDISKFLNWYQKKPGKAIKLLIYHTSRLHSGVPSRFSGSGSGTDFTLTISSLQPEDFATYYCQQGATLPYTFGPGTKVEIKSSASTKGPSVFPLAPSSKSTSGGTAALGCLVKDYFPEPVTVSWNSGALTSGVHTFPAVLQSSGLYSLKSVVTVPSSSLGTQTYICNVNHKPSNTKVDKKVEPKSCDKTHTCPPCPAPELLGGPDVFLFPPKPKDTLMISRTPEVTCVVVDVSHEDPEVKFNWYVDGVEVHNAKTKPREEQYNSTYRVVSVLTVLHQDWLNGKEYKCKVSNKALPAPEEKTISKAKGQPREPQVYTLPPCRDELTKNQVSLWCLVKGFYPSDIAVEWESNGQPENNYKTTPPVLDSDGSFFLYSKLTVDKSRWQQGNVFSCSVMHEALHNHYTQKSLSLSPG

SEQ ID NO: 4774 - protein, 606 aa, synthetic construct
  REGION 1..606: note = R_VH-CH1/Q39EK/S183E/CLD201/hole/SIDE/RF
QVQLQQPGAELVKPGASVKMSCKASGYTFTSYNMHWVKETPGRGLEWIGAIYPGNGDTSYNQKFKGKATLTADKSSSTAYMQLSSLTSEDSAVYYCARSTYYGGDWYFNVWGAGTTVTVSAASTKGPSVFPLAPSSKSTSGGTAALGCLVKDYFPEPVTVSWNSGALTSGVHTFPAVLQSSGLYSLESVVTVPSSSLGTQTYICNVNHKPSNTKVDKKVEPKSCTDWSPYADQSIKVRISLKSALGDKAYEWNDNEMYLFRSSVAYAMRQYFLKVKNQMILFGEEDVRVANLKPRISFNFFVTAPKNVSDIIPRTEVEKAIRMSRSRINDAFRLNDNSLEFLGIQPTLGPPNQPPVSTSTSPTRSMAPGAVHLPQPVSTRDKTHTCPPCPAPELLGGPDVFLFPPKPKDTLMISRTPEVTCVVVDVSHEDPEVKFNWYVDGVEVHNAKTKPREEQYNSTYRVVSVLTVLHQDWLNGKEYKCKVSNKALPAPEEKTISKAKGQPREPQVCTLPPSRDELTKNQVSLSCAVKGFYPSDIAVEWESNGQPENNYKTTPPVLDSDGSFFLVSKLTVDKSRWQQGNVFSCSVMHEALHNRFTQKSLSLSPG

SEQ ID NO: 4775 - protein, 605 aa, synthetic construct
  REGION 1..605: note = FMC47_VH-CH1/N84S/Q39K/S183E/CLD201/hole/SIDE/RF
QVQLVQSGGGVVQPGRSLRLSCAASGVSLPDYGVSWVRKAPGKGLEWVAVIWGSETTYYNSALKSRFTISRDNSKNTLYLQMSSLRAEDTAVYYCAKHYYYGGSFAMDYWGQGTLVTVSSASTKGPSVFPLAPSSKSTSGGTAALGCLVKDYFPEPVTVSWNSGALTSGVHTFPAVLQSSGLYSLESVVTVPSSSLGTQTYICNVNHKPSNTKVDKKVEPKSCTDWSPYADQSIKVRISLKSALGDKAYEWNDNEMYLFRSSVAYAMRQYFLKVKNQMILFGEEDVRVANLKPRISFNFFVTAPKNVSDIIPRTEVEKAIRMSRSRINDAFRLNDNSLEFLGIQPTLGPPNQPPVSTSTSPTRSMAPGAVHLPQPVSTRDKTHTCPPCPAPELLGGPDVFLFPPKPKDTLMISRTPEVTCVVVDVSHEDPEVKFNWYVDGVEVHNAKTKPREEQYNSTYRVVSVLTVLHQDWLNGKEYKCKVSNKALPAPEEKTISKAKGQPREPQVCTLPPSRDELTKNQVSLSCAVKGFYPSDIAVEWESNGQPENNYKTTPPVLDSDGSFFLVSKLTVDKSRWQQGNVFSCSVMHEALHNRFTQKSLSLSPG

SEQ ID NO: 4776 - protein, 605 aa, synthetic construct
  REGION 1..605: note = FMC47_VH-CH1/N84S/Q39E/S183E/CLD201/hole/SIDE/RF
QVQLVQSGGGVVQPGRSLRLSCAASGVSLPDYGVSWVREAPGKGLEWVAVIWGSETTYYNSALKSRFTISRDNSKNTLYLQMSSLRAEDTAVYYCAKHYYYGGSFAMDYWGQGTLVTVSSASTKGPSVFPLAPSSKSTSGGTAALGCLVKDYFPEPVTVSWNSGALTSGVHTFPAVLQSSGLYSLESVVTVPSSSLGTQTYICNVNHKPSNTKVDKKVEPKSCTDWSPYADQSIKVRISLKSALGDKAYEWNDNEMYLFRSSVAYAMRQYFLKVKNQMILFGEEDVRVANLKPRISFNFFVTAPKNVSDIIPRTEVEKAIRMSRSRINDAFRLNDNSLEFLGIQPTLGPPNQPPVSTSTSPTRSMAPGAVHLPQPVSTRDKTHTCPPCPAPELLGGPDVFLFPPKPKDTLMISRTPEVTCVVVDVSHEDPEVKFNWYVDGVEVHNAKTKPREEQYNSTYRVVSVLTVLHQDWLNGKEYKCKVSNKALPAPEEKTISKAKGQPREPQVCTLPPSRDELTKNQVSLSCAVKGFYPSDIAVEWESNGQPENNYKTTPPVLDSDGSFFLVSKLTVDKSRWQQGNVFSCSVMHEALHNRFTQKSLSLSPG

SEQ ID NO: 4777 - protein, 449 aa, synthetic construct
  REGION 1..449: note = FMC47_VH-CH/N84S
QVQLVQSGGGVVQPGRSLRLSCAASGVSLPDYGVSWVRQAPGKGLEWVAVIWGSETTYYNSALKSRFTISRDNSKNTLYLQMSSLRAEDTAVYYCAKHYYYGGSFAMDYWGQGTLVTVSSASTKGPSVFPLAPSSKSTSGGTAALGCLVKDYFPEPVTVSWNSGALTSGVHTFPAVLQSSGLYSLSSVVTVPSSSLGTQTYICNVNHKPSNTKVDKKVEPKSCDKTHTCPPCPAPELLGGPSVFLFPPKPKDTLMISRTPEVTCVVVDVSHEDPEVKFNWYVDGVEVHNAKTKPREEQYNSTYRVVSVLTVLHQDWLNGKEYKCKVSNKALPAPIEKTISKAKGQPREPQVYTLPPSRDELTKNQVSLTCLVKGFYPSDIAVEWESNGQPENNYKTTPPVLDSDGSFFLYSKLTVDKSRWQQGNVFSCSVMHEALHNHYTQKSLSLSPG

SEQ ID NO: 4778 - protein, 449 aa, synthetic construct
  REGION 1..449: note = FMC47_VH-CH/N84S/SIDE
QVQLVQSGGGVVQPGRSLRLSCAASGVSLPDYGVSWVRQAPGKGLEWVAVIWGSETTYYNSALKSRFTISRDNSKNTLYLQMSSLRAEDTAVYYCAKHYYYGGSFAMDYWGQGTLVTVSSASTKGPSVFPLAPSSKSTSGGTAALGCLVKDYFPEPVTVSWNSGALTSGVHTFPAVLQSSGLYSLSSVVTVPSSSLGTQTYICNVNHKPSNTKVDKKVEPKSCDKTHTCPPCPAPELLGGPDVFLFPPKPKDTLMISRTPEVTCVVVDVSHEDPEVKFNWYVDGVEVHNAKTKPREEQYNSTYRVVSVLTVLHQDWLNGKEYKCKVSNKALPAPEEKTISKAKGQPREPQVYTLPPSRDELTKNQVSLTCLVKGFYPSDIAVEWESNGQPENNYKTTPPVLDSDGSFFLYSKLTVDKSRWQQGNVFSCSVMHEALHNHYTQKSLSLSPG

SEQ ID NO: 4779 - protein, 605 aa, synthetic construct
  REGION 1..605: note = FMC47_VH-CH1/N84S/CLD201/hole/RF
QVQLVQSGGGVVQPGRSLRLSCAASGVSLPDYGVSWVRQAPGKGLEWVAVIWGSETTYYNSALKSRFTISRDNSKNTLYLQMSSLRAEDTAVYYCAKHYYYGGSFAMDYWGQGTLVTVSSASTKGPSVFPLAPSSKSTSGGTAALGCLVKDYFPEPVTVSWNSGALTSGVHTFPAVLQSSGLYSLSSVVTVPSSSLGTQTYICNVNHKPSNTKVDKKVEPKSCTDWSPYADQSIKVRISLKSALGDKAYEWNDNEMYLFRSSVAYAMRQYFLKVKNQMILFGEEDVRVANLKPRISFNFFVTAPKNVSDIIPRTEVEKAIRMSRSRINDAFRLNDNSLEFLGIQPTLGPPNQPPVSTSTSPTRSMAPGAVHLPQPVSTRDKTHTCPPCPAPELLGGPSVFLFPPKPKDTLMISRTPEVTCVVVDVSHEDPEVKFNWYVDGVEVHNAKTKPREEQYNSTYRVVSVLTVLHQDWLNGKEYKCKVSNKALPAPIEKTISKAKGQPREPQVCTLPPSRDELTKNQVSLSCAVKGFYPSDIAVEWESNGQPENNYKTTPPVLDSDGSFFLVSKLTVDKSRWQQGNVFSCSVMHEALHNRFTQKSLSLSPG

SEQ ID NO: 4780 - protein, 449 aa, synthetic construct
  REGION 1..449: note = FMC47_VH-CH1/N84S/knob
QVQLVQSGGGVVQPGRSLRLSCAASGVSLPDYGVSWVRQAPGKGLEWVAVIWGSETTYYNSALKSRFTISRDNSKNTLYLQMSSLRAEDTAVYYCAKHYYYGGSFAMDYWGQGTLVTVSSASTKGPSVFPLAPSSKSTSGGTAALGCLVKDYFPEPVTVSWNSGALTSGVHTFPAVLQSSGLYSLSSVVTVPSSSLGTQTYICNVNHKPSNTKVDKKVEPKSCDKTHTCPPCPAPELLGGPSVFLFPPKPKDTLMISRTPEVTCVVVDVSHEDPEVKFNWYVDGVEVHNAKTKPREEQYNSTYRVVSVLTVLHQDWLNGKEYKCKVSNKALPAPIEKTISKAKGQPREPQVYTLPPCRDELTKNQVSLWCLVKGFYPSDIAVEWESNGQPENNYKTTPPVLDSDGSFFLYSKLTVDKSRWQQGNVFSCSVMHEALHNHYTQKSLSLSPG

SEQ ID NO: 4781 - protein, 605 aa, synthetic construct
  REGION 1..605: note = FMC47_VH-CH1/N84S/CLD201/hole/SD/RF
QVQLVQSGGGVVQPGRSLRLSCAASGVSLPDYGVSWVRQAPGKGLEWVAVIWGSETTYYNSALKSRFTISRDNSKNTLYLQMSSLRAEDTAVYYCAKHYYYGGSFAMDYWGQGTLVTVSSASTKGPSVFPLAPSSKSTSGGTAALGCLVKDYFPEPVTVSWNSGALTSGVHTFPAVLQSSGLYSLSSVVTVPSSSLGTQTYICNVNHKPSNTKVDKKVEPKSCTDWSPYADQSIKVRISLKSALGDKAYEWNDNEMYLFRSSVAYAMRQYFLKVKNQMILFGEEDVRVANLKPRISFNFFVTAPKNVSDIIPRTEVEKAIRMSRSRINDAFRLNDNSLEFLGIQPTLGPPNQPPVSTSTSPTRSMAPGAVHLPQPVSTRDKTHTCPPCPAPELLGGPDVFLFPPKPKDTLMISRTPEVTCVVVDVSHEDPEVKFNWYVDGVEVHNAKTKPREEQYNSTYRVVSVLTVLHQDWLNGKEYKCKVSNKALPAPIEKTISKAKGQPREPQVCTLPPSRDELTKNQVSLSCAVKGFYPSDIAVEWESNGQPENNYKTTPPVLDSDGSFFLVSKLTVDKSRWQQGNVFSCSVMHEALHNRFTQKSLSLSPG

SEQ ID NO: 4782 - protein, 449 aa, synthetic construct
  REGION 1..449: note = FMC47_VH-CH1/N84S/knob/IE
QVQLVQSGGGVVQPGRSLRLSCAASGVSLPDYGVSWVRQAPGKGLEWVAVIWGSETTYYNSALKSRFTISRDNSKNTLYLQMSSLRAEDTAVYYCAKHYYYGGSFAMDYWGQGTLVTVSSASTKGPSVFPLAPSSKSTSGGTAALGCLVKDYFPEPVTVSWNSGALTSGVHTFPAVLQSSGLYSLSSVVTVPSSSLGTQTYICNVNHKPSNTKVDKKVEPKSCDKTHTCPPCPAPELLGGPSVFLFPPKPKDTLMISRTPEVTCVVVDVSHEDPEVKFNWYVDGVEVHNAKTKPREEQYNSTYRVVSVLTVLHQDWLNGKEYKCKVSNKALPAPEEKTISKAKGQPREPQVYTLPPCRDELTKNQVSLWCLVKGFYPSDIAVEWESNGQPENNYKTTPPVLDSDGSFFLYSKLTVDKSRWQQGNVFSCSVMHEALHNHYTQKSLSLSPG

SEQ ID NO: 4783 - protein, 605 aa, synthetic construct
  REGION 1..605: note = FMC47_VH-CH1/N84S/CLD201/hole/IE/RF
QVQLVQSGGGVVQPGRSLRLSCAASGVSLPDYGVSWVRQAPGKGLEWVAVIWGSETTYYNSALKSRFTISRDNSKNTLYLQMSSLRAEDTAVYYCAKHYYYGGSFAMDYWGQGTLVTVSSASTKGPSVFPLAPSSKSTSGGTAALGCLVKDYFPEPVTVSWNSGALTSGVHTFPAVLQSSGLYSLSSVVTVPSSSLGTQTYICNVNHKPSNTKVDKKVEPKSCTDWSPYADQSIKVRISLKSALGDKAYEWNDNEMYLFRSSVAYAMRQYFLKVKNQMILFGEEDVRVANLKPRISFNFFVTAPKNVSDIIPRTEVEKAIRMSRSRINDAFRLNDNSLEFLGIQPTLGPPNQPPVSTSTSPTRSMAPGAVHLPQPVSTRDKTHTCPPCPAPELLGGPSVFLFPPKPKDTLMISRTPEVTCVVVDVSHEDPEVKFNWYVDGVEVHNAKTKPREEQYNSTYRVVSVLTVLHQDWLNGKEYKCKVSNKALPAPEEKTISKAKGQPREPQVCTLPPSRDELTKNQVSLSCAVKGFYPSDIAVEWESNGQPENNYKTTPPVLDSDGSFFLVSKLTVDKSRWQQGNVFSCSVMHEALHNRFTQKSLSLSPG

SEQ ID NO: 4784 - protein, 449 aa, synthetic construct
  REGION 1..449: note = FMC47_VH-CH1/N84S/knob/SD
QVQLVQSGGGVVQPGRSLRLSCAASGVSLPDYGVSWVRQAPGKGLEWVAVIWGSETTYYNSALKSRFTISRDNSKNTLYLQMSSLRAEDTAVYYCAKHYYYGGSFAMDYWGQGTLVTVSSASTKGPSVFPLAPSSKSTSGGTAALGCLVKDYFPEPVTVSWNSGALTSGVHTFPAVLQSSGLYSLSSVVTVPSSSLGTQTYICNVNHKPSNTKVDKKVEPKSCDKTHTCPPCPAPELLGGPDVFLFPPKPKDTLMISRTPEVTCVVVDVSHEDPEVKFNWYVDGVEVHNAKTKPREEQYNSTYRVVSVLTVLHQDWLNGKEYKCKVSNKALPAPIEKTISKAKGQPREPQVYTLPPCRDELTKNQVSLWCLVKGFYPSDIAVEWESNGQPENNYKTTPPVLDSDGSFFLYSKLTVDKSRWQQGNVFSCSVMHEALHNHYTQKSLSLSPG

SEQ ID NO: 4785 - protein, 605 aa, synthetic construct
  REGION 1..605: note = FMC47_VH-CH1/N84S/CLD201/hole/SIDE/RF
QVQLVQSGGGVVQPGRSLRLSCAASGVSLPDYGVSWVRQAPGKGLEWVAVIWGSETTYYNSALKSRFTISRDNSKNTLYLQMSSLRAEDTAVYYCAKHYYYGGSFAMDYWGQGTLVTVSSASTKGPSVFPLAPSSKSTSGGTAALGCLVKDYFPEPVTVSWNSGALTSGVHTFPAVLQSSGLYSLSSVVTVPSSSLGTQTYICNVNHKPSNTKVDKKVEPKSCTDWSPYADQSIKVRISLKSALGDKAYEWNDNEMYLFRSSVAYAMRQYFLKVKNQMILFGEEDVRVANLKPRISFNFFVTAPKNVSDIIPRTEVEKAIRMSRSRINDAFRLNDNSLEFLGIQPTLGPPNQPPVSTSTSPTRSMAPGAVHLPQPVSTRDKTHTCPPCPAPELLGGPDVFLFPPKPKDTLMISRTPEVTCVVVDVSHEDPEVKFNWYVDGVEVHNAKTKPREEQYNSTYRVVSVLTVLHQDWLNGKEYKCKVSNKALPAPEEKTISKAKGQPREPQVCTLPPSRDELTKNQVSLSCAVKGFYPSDIAVEWESNGQPENNYKTTPPVLDSDGSFFLVSKLTVDKSRWQQGNVFSCSVMHEALHNRFTQKSLSLSPG

SEQ ID NO: 4786 - protein, 449 aa, synthetic construct
  REGION 1..449: note = FMC47_VH-CH1/N84S/knob/SIDE
QVQLVQSGGGVVQPGRSLRLSCAASGVSLPDYGVSWVRQAPGKGLEWVAVIWGSETTYYNSALKSRFTISRDNSKNTLYLQMSSLRAEDTAVYYCAKHYYYGGSFAMDYWGQGTLVTVSSASTKGPSVFPLAPSSKSTSGGTAALGCLVKDYFPEPVTVSWNSGALTSGVHTFPAVLQSSGLYSLSSVVTVPSSSLGTQTYICNVNHKPSNTKVDKKVEPKSCDKTHTCPPCPAPELLGGPDVFLFPPKPKDTLMISRTPEVTCVVVDVSHEDPEVKFNWYVDGVEVHNAKTKPREEQYNSTYRVVSVLTVLHQDWLNGKEYKCKVSNKALPAPEEKTISKAKGQPREPQVYTLPPCRDELTKNQVSLWCLVKGFYPSDIAVEWESNGQPENNYKTTPPVLDSDGSFFLYSKLTVDKSRWQQGNVFSCSVMHEALHNHYTQKSLSLSPG

SEQ ID NO: 4787 - protein, 438 aa, synthetic construct
  REGION 1..438: note = FMC59_VK-x-CH1/Q38E/S183K/knob
DIQMTQSPSSLSASVGDRVTITCRASQDISKYLNWYQEKPGKAIKLLIYHTSRLHSGVPSRFSGSGSGTDFTLTISSLQPEDFATYYCQQGATLPYTFGPGTKVEIKSSASTKGPSVFPLAPSSKSTSGGTAALGCLVKDYFPEPVTVSWNSGALTSGVHTFPAVLQSSGLYSLKSVVTVPSSSLGTQTYICNVNHKPSNTKVDKKVEPKSCDKTHTCPPCPAPELLGGPSVFLFPPKPKDTLMISRTPEVTCVVVDVSHEDPEVKFNWYVDGVEVHNAKTKPREEQYNSTYRVVSVLTVLHQDWLNGKEYKCKVSNKALPAPIEKTISKAKGQPREPQVYTLPPCRDELTKNQVSLWCLVKGFYPSDIAVEWESNGQPENNYKTTPPVLDSDGSFFLYSKLTVDKSRWQQGNVFSCSVMHEALHNHYTQKSLSLSPG

SEQ ID NO: 4788 - protein, 438 aa, synthetic construct
  REGION 1..438: note = FMC59_VK-x-CH1/Q38K/S183K/knob
DIQMTQSPSSLSASVGDRVTITCRASQDISKYLNWYQKKPGKAIKLLIYHTSRLHSGVPSRFSGSGSGTDFTLTISSLQPEDFATYYCQQGATLPYTFGPGTKVEIKSSASTKGPSVFPLAPSSKSTSGGTAALGCLVKDYFPEPVTVSWNSGALTSGVHTFPAVLQSSGLYSLKSVVTVPSSSLGTQTYICNVNHKPSNTKVDKKVEPKSCDKTHTCPPCPAPELLGGPSVFLFPPKPKDTLMISRTPEVTCVVVDVSHEDPEVKFNWYVDGVEVHNAKTKPREEQYNSTYRVVSVLTVLHQDWLNGKEYKCKVSNKALPAPIEKTISKAKGQPREPQVYTLPPCRDELTKNQVSLWCLVKGFYPSDIAVEWESNGQPENNYKTTPPVLDSDGSFFLYSKLTVDKSRWQQGNVFSCSVMHEALHNHYTQKSLSLSPG

SEQ ID NO: 4789 - protein, 438 aa, synthetic construct
  REGION 1..438: note = FMC59_VK-x-CH1/Q38E/S183K/knob/IE
DIQMTQSPSSLSASVGDRVTITCRASQDISKYLNWYQEKPGKAIKLLIYHTSRLHSGVPSRFSGSGSGTDFTLTISSLQPEDFATYYCQQGATLPYTFGPGTKVEIKSSASTKGPSVFPLAPSSKSTSGGTAALGCLVKDYFPEPVTVSWNSGALTSGVHTFPAVLQSSGLYSLKSVVTVPSSSLGTQTYICNVNHKPSNTKVDKKVEPKSCDKTHTCPPCPAPELLGGPSVFLFPPKPKDTLMISRTPEVTCVVVDVSHEDPEVKFNWYVDGVEVHNAKTKPREEQYNSTYRVVSVLTVLHQDWLNGKEYKCKVSNKALPAPEEKTISKAKGQPREPQVYTLPPCRDELTKNQVSLWCLVKGFYPSDIAVEWESNGQPENNYKTTPPVLDSDGSFFLYSKLTVDKSRWQQGNVFSCSVMHEALHNHYTQKSLSLSPG

SEQ ID NO: 4790 - protein, 438 aa, synthetic construct
  REGION 1..438: note = FMC59_VK-x-CH1/Q38K/S183K/knob/IE
DIQMTQSPSSLSASVGDRVTITCRASQDISKYLNWYQKKPGKAIKLLIYHTSRLHSGVPSRFSGSGSGTDFTLTISSLQPEDFATYYCQQGATLPYTFGPGTKVEIKSSASTKGPSVFPLAPSSKSTSGGTAALGCLVKDYFPEPVTVSWNSGALTSGVHTFPAVLQSSGLYSLKSVVTVPSSSLGTQTYICNVNHKPSNTKVDKKVEPKSCDKTHTCPPCPAPELLGGPSVFLFPPKPKDTLMISRTPEVTCVVVDVSHEDPEVKFNWYVDGVEVHNAKTKPREEQYNSTYRVVSVLTVLHQDWLNGKEYKCKVSNKALPAPEEKTISKAKGQPREPQVYTLPPCRDELTKNQVSLWCLVKGFYPSDIAVEWESNGQPENNYKTTPPVLDSDGSFFLYSKLTVDKSRWQQGNVFSCSVMHEALHNHYTQKSLSLSPG

SEQ ID NO: 4791 - protein, 438 aa, synthetic construct
  REGION 1..438: note = FMC59_VK-x-CH1/Q38E/S183K/knob/SD
DIQMTQSPSSLSASVGDRVTITCRASQDISKYLNWYQEKPGKAIKLLIYHTSRLHSGVPSRFSGSGSGTDFTLTISSLQPEDFATYYCQQGATLPYTFGPGTKVEIKSSASTKGPSVFPLAPSSKSTSGGTAALGCLVKDYFPEPVTVSWNSGALTSGVHTFPAVLQSSGLYSLKSVVTVPSSSLGTQTYICNVNHKPSNTKVDKKVEPKSCDKTHTCPPCPAPELLGGPDVFLFPPKPKDTLMISRTPEVTCVVVDVSHEDPEVKFNWYVDGVEVHNAKTKPREEQYNSTYRVVSVLTVLHQDWLNGKEYKCKVSNKALPAPIEKTISKAKGQPREPQVYTLPPCRDELTKNQVSLWCLVKGFYPSDIAVEWESNGQPENNYKTTPPVLDSDGSFFLYSKLTVDKSRWQQGNVFSCSVMHEALHNHYTQKSLSLSPG

SEQ ID NO: 4792 - protein, 438 aa, synthetic construct
  REGION 1..438: note = FMC59_VK-x-CH1/Q38K/S183K/knob/SD
DIQMTQSPSSLSASVGDRVTITCRASQDISKYLNWYQKKPGKAIKLLIYHTSRLHSGVPSRFSGSGSGTDFTLTISSLQPEDFATYYCQQGATLPYTFGPGTKVEIKSSASTKGPSVFPLAPSSKSTSGGTAALGCLVKDYFPEPVTVSWNSGALTSGVHTFPAVLQSSGLYSLKSVVTVPSSSLGTQTYICNVNHKPSNTKVDKKVEPKSCDKTHTCPPCPAPELLGGPDVFLFPPKPKDTLMISRTPEVTCVVVDVSHEDPEVKFNWYVDGVEVHNAKTKPREEQYNSTYRVVSVLTVLHQDWLNGKEYKCKVSNKALPAPIEKTISKAKGQPREPQVYTLPPCRDELTKNQVSLWCLVKGFYPSDIAVEWESNGQPENNYKTTPPVLDSDGSFFLYSKLTVDKSRWQQGNVFSCSVMHEALHNHYTQKSLSLSPG

SEQ ID NO: 4793 - protein, 438 aa, synthetic construct
  REGION 1..438: note = FMC59_VK-x-CH1/Q38E/S183K/knob/SIDE
DIQMTQSPSSLSASVGDRVTITCRASQDISKYLNWYQEKPGKAIKLLIYHTSRLHSGVPSRFSGSGSGTDFTLTISSLQPEDFATYYCQQGATLPYTFGPGTKVEIKSSASTKGPSVFPLAPSSKSTSGGTAALGCLVKDYFPEPVTVSWNSGALTSGVHTFPAVLQSSGLYSLKSVVTVPSSSLGTQTYICNVNHKPSNTKVDKKVEPKSCDKTHTCPPCPAPELLGGPDVFLFPPKPKDTLMISRTPEVTCVVVDVSHEDPEVKFNWYVDGVEVHNAKTKPREEQYNSTYRVVSVLTVLHQDWLNGKEYKCKVSNKALPAPEEKTISKAKGQPREPQVYTLPPCRDELTKNQVSLWCLVKGFYPSDIAVEWESNGQPENNYKTTPPVLDSDGSFFLYSKLTVDKSRWQQGNVFSCSVMHEALHNHYTQKSLSLSPG

SEQ ID NO: 4794 - protein, 438 aa, synthetic construct
  REGION 1..438: note = FMC59_VK-x-CH1/Q38K/S183K/knob/SIDE
DIQMTQSPSSLSASVGDRVTITCRASQDISKYLNWYQKKPGKAIKLLIYHTSRLHSGVPSRFSGSGSGTDFTLTISSLQPEDFATYYCQQGATLPYTFGPGTKVEIKSSASTKGPSVFPLAPSSKSTSGGTAALGCLVKDYFPEPVTVSWNSGALTSGVHTFPAVLQSSGLYSLKSVVTVPSSSLGTQTYICNVNHKPSNTKVDKKVEPKSCDKTHTCPPCPAPELLGGPDVFLFPPKPKDTLMISRTPEVTCVVVDVSHEDPEVKFNWYVDGVEVHNAKTKPREEQYNSTYRVVSVLTVLHQDWLNGKEYKCKVSNKALPAPEEKTISKAKGQPREPQVYTLPPCRDELTKNQVSLWCLVKGFYPSDIAVEWESNGQPENNYKTTPPVLDSDGSFFLYSKLTVDKSRWQQGNVFSCSVMHEALHNHYTQKSLSLSPG

SEQ ID NO: 4795 - protein, 606 aa, synthetic construct; identical to SEQ ID NO: 593
  REGION 1..606: note = B13A_VH-CH1/N84S/Q39K/S183E/CLD201/hole/RF

SEQ ID NO: 4796 - protein, 442 aa, synthetic construct; identical to SEQ ID NO: 594
  REGION 1..442: note = O24A_VK-x-CH1/Q38E/S183K/knob

SEQ ID NO: 4797 - protein, 442 aa, synthetic construct; identical to SEQ ID NO: 595
  REGION 1..442: note = O24A_VK-x-CH1/Q38K/S183K/knob

SEQ ID NO: 4798 - protein, 603 aa, synthetic construct; identical to SEQ ID NO: 603
  REGION 1..603: note = O24A_VH-CH1/N84S/Q39K/S183E/CLD201/hole/RF

SEQ ID NO: 4799 - protein, 438 aa, synthetic construct; identical to SEQ ID NO: 604
  REGION 1..438: note = B13A_VK-x-CH1/Q38E/S183K/knob

SEQ ID NO: 4800 - protein, 438 aa, synthetic construct; identical to SEQ ID NO: 605
  REGION 1..438: note = B13A_VK-x-CH1/Q38K/S183K/knob

SEQ ID NO: 4801 - protein, 213 aa, synthetic construct; identical to SEQ ID NO: 733
  REGION 1..213: note = R_VK-Ck/E123R/Q124K

SEQ ID NO: 4802 - protein, 227 aa, synthetic construct; identical to SEQ ID NO: 734
  REGION 1..227: note = FMC63_VH-x-CK/N84S

SEQ ID NO: 4803 - protein, 213 aa, synthetic construct; identical to SEQ ID NO: 735
  REGION 1..213: note = R_VK-CK/Q38E/V133K

SEQ ID NO: 4804 - protein, 227 aa, synthetic construct; identical to SEQ ID NO: 736
  REGION 1..227: note = FMC63_VH-x-CK/N84S/Q39K/V133E

SEQ ID NO: 4805 - protein, 227 aa, synthetic construct; identical to SEQ ID NO: 737
  REGION 1..227: note = FMC63_VH-x-CK/N84S/Q39E/V133E

SEQ ID NO: 4806 - protein, 214 aa, synthetic construct; identical to SEQ ID NO: 738
  REGION 1..214: note = FMC63_VK-Ck/E123R/Q124K

SEQ ID NO: 4807 - protein, 228 aa, synthetic construct; identical to SEQ ID NO: 739
  REGION 1..228: note = R_VH-x-CK

SEQ ID NO: 4808 - protein, 214 aa, synthetic construct; identical to SEQ ID NO: 740
  REGION 1..214: note = FMC63_VK-CK/Q38E/V133K

SEQ ID NO: 4809 - protein, 228 aa, synthetic construct; identical to SEQ ID NO: 741
  REGION 1..228: note = R_VH-x-CK/Q39K/V133E

SEQ ID NO: 4810 - protein, 228 aa, synthetic construct; identical to SEQ ID NO: 742
  REGION 1..228: note = R_VH-x-CK/Q39E/V133E

SEQ ID NO: 4811 - protein, 213 aa, synthetic construct; identical to SEQ ID NO: 1
  REGION 1..213: note = R_VK-Ck

SEQ ID NO: 4812 - protein, 214 aa, synthetic construct
  REGION 1..214: note = FMC63_VK-Ck
DIQMTQTTSSLSASLGDRVTISCRASQDISKYLNWYQQKPDGTVKLLIYHTSRLHSGVPSRFSGSGSGTDYSLTISNLEQEDIATYFCQQGNTLPYTFGGGTKLEIKRTVAAPSVFIFPPSDEQLKSGTASVVCLLNNFYPREAKVQWKVDNALQSGNSQESVTEQDSKDSTYSLSSTLTLSKADYEKHKVYACEVTHQGLSSPVTKSFNRGEC

SEQ ID NO: 4813 - protein, 227 aa, synthetic construct
  REGION 1..227: note = FMC47_VH-x-CK/N84S/Q39K/V133E
QVQLVQSGGGVVQPGRSLRLSCAASGVSLPDYGVSWVRKAPGKGLEWVAVIWGSETTYYNSALKSRFTISRDNSKNTLYLQMSSLRAEDTAVYYCAKHYYYGGSFAMDYWGQGTLVTVSSASVAAPSVFIFPPSDEQLKSGTASVECLLNNFYPREAKVQWKVDNALQSGNSQESVTEQDSKDSTYSLSSTLTLSKADYEKHKVYACEVTHQGLSSPVTKSFNRGEC

SEQ ID NO: 4814 - protein, 227 aa, synthetic construct
  REGION 1..227: note = FMC47_VH-x-CK/N84S/Q39E/V133E
QVQLVQSGGGVVQPGRSLRLSCAASGVSLPDYGVSWVREAPGKGLEWVAVIWGSETTYYNSALKSRFTISRDNSKNTLYLQMSSLRAEDTAVYYCAKHYYYGGSFAMDYWGQGTLVTVSSASVAAPSVFIFPPSDEQLKSGTASVECLLNNFYPREAKVQWKVDNALQSGNSQESVTEQDSKDSTYSLSSTLTLSKADYEKHKVYACEVTHQGLSSPVTKSFNRGEC

SEQ ID NO: 4815 - protein, 213 aa, synthetic construct
  REGION 1..213: note = R_VK-CK/Q38K/V133K
QIVLSQSPAILSASPGEKVTMTCRASSSVSYIHWFQKKPGSSPKPWIYATSNLASGVPVRFSGSGSGTSYSLTISRVEAEDAATYYCQQWTSNPPTFGGGTKLEIKRTVAAPSVFIFPPSDEQLKSGTASVKCLLNNFYPREAKVQWKVDNALQSGNSQESVTEQDSKDSTYSLSSTLTLSKADYEKHKVYACEVTHQGLSSPVTKSFNRGEC

SEQ ID NO: 4816 - protein, 214 aa, synthetic construct
  REGION 1..214: note = FMC60_VK-CK/Q38E/V133K
DIQMTQSPSSLSASVGDRVTITCRASQDISKFLNWYQEKPGKAIKLLIYHTSRLHSGVPSRFSGSGSGTDFTLTISSLQPEDFATYYCQQGATLPYTFGPGTKLEIKRTVAAPSVFIFPPSDEQLKSGTASVKCLLNNFYPREAKVQWKVDNALQSGNSQESVTEQDSKDSTYSLSSTLTLSKADYEKHKVYACEVTHQGLSSPVTKSFNRGEC

SEQ ID NO: 4817 - protein, 214 aa, synthetic construct
  REGION 1..214: note = FMC60_VK-CK/Q38K/V133K
DIQMTQSPSSLSASVGDRVTITCRASQDISKFLNWYQKKPGKAIKLLIYHTSRLHSGVPSRFSGSGSGTDFTLTISSLQPEDFATYYCQQGATLPYTFGPGTKLEIKRTVAAPSVFIFPPSDEQLKSGTASVKCLLNNFYPREAKVQWKVDNALQSGNSQESVTEQDSKDSTYSLSSTLTLSKADYEKHKVYACEVTHQGLSSPVTKSFNRGEC

SEQ ID NO: 4818 - protein, 214 aa, synthetic construct
  REGION 1..214: note = FMC60_VK-Ck
DIQMTQSPSSLSASVGDRVTITCRASQDISKFLNWYQQKPGKAIKLLIYHTSRLHSGVPSRFSGSGSGTDFTLTISSLQPEDFATYYCQQGATLPYTFGPGTKLEIKRTVAAPSVFIFPPSDEQLKSGTASVVCLLNNFYPREAKVQWKVDNALQSGNSQESVTEQDSKDSTYSLSSTLTLSKADYEKHKVYACEVTHQGLSSPVTKSFNRGEC

SEQ ID NO: 4819 - protein, 214 aa, synthetic construct
  REGION 1..214: note = FMC59_VK-CK/Q38E/V133K
DIQMTQSPSSLSASVGDRVTITCRASQDISKYLNWYQEKPGKAIKLLIYHTSRLHSGVPSRFSGSGSGTDFTLTISSLQPEDFATYYCQQGATLPYTFGPGTKLEIKRTVAAPSVFIFPPSDEQLKSGTASVKCLLNNFYPREAKVQWKVDNALQSGNSQESVTEQDSKDSTYSLSSTLTLSKADYEKHKVYACEVTHQGLSSPVTKSFNRGEC

SEQ ID NO: 4820 - protein, 214 aa, synthetic construct
  REGION 1..214: note = FMC59_VK-CK/Q38K/V133K
DIQMTQSPSSLSASVGDRVTITCRASQDISKYLNWYQKKPGKAIKLLIYHTSRLHSGVPSRFSGSGSGTDFTLTISSLQPEDFATYYCQQGATLPYTFGPGTKLEIKRTVAAPSVFIFPPSDEQLKSGTASVKCLLNNFYPREAKVQWKVDNALQSGNSQESVTEQDSKDSTYSLSSTLTLSKADYEKHKVYACEVTHQGLSSPVTKSFNRGEC

SEQ ID NO: 4821 - protein, 214 aa, synthetic construct
  REGION 1..214: note = FMC59_VK-Ck
DIQMTQSPSSLSASVGDRVTITCRASQDISKYLNWYQQKPGKAIKLLIYHTSRLHSGVPSRFSGSGSGTDFTLTISSLQPEDFATYYCQQGATLPYTFGPGTKLEIKRTVAAPSVFIFPPSDEQLKSGTASVVCLLNNFYPREAKVQWKVDNALQSGNSQESVTEQDSKDSTYSLSSTLTLSKADYEKHKVYACEVTHQGLSSPVTKSFNRGEC

SEQ ID NO: 4822 - protein, 214 aa, synthetic construct; identical to SEQ ID NO: 633
  REGION 1..214: note = B13A_VK-CK/Q38E/V133K

SEQ ID NO: 4823 - protein, 225 aa, synthetic construct; identical to SEQ ID NO: 634
  REGION 1..225: note = O24A_VH-x-CK/Q39K/V133E

SEQ ID NO: 4824 - protein, 225 aa, synthetic construct; identical to SEQ ID NO: 635
  REGION 1..225: note = O24A_VH-x-CK/Q39E/V133E

SEQ ID NO: 4825 - protein, 218 aa, synthetic construct; identical to SEQ ID NO: 638
  REGION 1..218: note = O24A_VK-CK/Q38E/V133K

SEQ ID NO: 4826 - protein, 228 aa, synthetic construct; identical to SEQ ID NO: 639
  REGION 1..228: note = B13A_VH-x-CK/Q39K/V133E

SEQ ID NO: 4827 - protein, 228 aa, synthetic construct; identical to SEQ ID NO: 640
  REGION 1..228: note = B13A_VH-x-CK/Q39E/V133E

SEQ ID NO: 4828 - protein, 221 aa, synthetic construct
  REGION 1..221: note = Fc6/knob
CPPCPAPELLGGPSVFLFPPKPKDTLMISRTPEVTCVVVDVSHEDPEVKFNWYVDGVEVHNAKTKPREEQYNSTYRVVSVLTVLHQDWLNGKEYKCKVSNKALPAPIEKTISKAKGQPREPQVYTLPPCRDELTKNQVSLWCLVKGFYPSDIAVEWESNGQPENNYKTTPPVLDSDGSFFLYSKLTVDKSRWQQGNVFSCSVMHEALHNHYTQKSLSLSPG

SEQ ID NO: 4829 - protein, 221 aa, synthetic construct
  REGION 1..221: note = Fc6/knob/SIDE
CPPCPAPELLGGPDVFLFPPKPKDTLMISRTPEVTCVVVDVSHEDPEVKFNWYVDGVEVHNAKTKPREEQYNSTYRVVSVLTVLHQDWLNGKEYKCKVSNKALPAPEEKTISKAKGQPREPQVYTLPPCRDELTKNQVSLWCLVKGFYPSDIAVEWESNGQPENNYKTTPPVLDSDGSFFLYSKLTVDKSRWQQGNVFSCSVMHEALHNHYTQKSLSLSPG

SEQ ID NO: 4830 - protein, 453 aa, synthetic construct
  REGION 1..453: note = ADG-20_VH-CH
EVQLVESGGGLVKPGGSLRLSCAASGFTFSSYYMNWVRQAPGKGLEWVSSISEDGYSTYYPDSLKGRFTISRDSAKNSLYLQMNSLRADDTAVYYCARDFSGHTAWAGTGFEYWGQGTLVTVSSASTKGPSVFPLAPSSKSTSGGTAALGCLVKDYFPEPVTVSWNSGALTSGVHTFPAVLQSSGLYSLSSVVTVPSSSLGTQTYICNVNHKPSNTKVDKRVEPKSCDKTHTCPPCPAPELLGGPSVFLFPPKPKDTLMISRTPEVTCVVVDVSHEDPEVKFNWYVDGVEVHNAKTKPREEQYNSTYRVVSVLTVLHQDWLNGKEYKCKVSNKALPAPIEKTISKAKGQPREPQVYTLPPSREEMTKNQVSLTCLVKGFYPSDIAVEWESNGQPENNYKTTPPVLDSDGSFFLYSKLTVDKSRWQQGNVFSCSVLHEALHAHYTQKSLSLSPG

SEQ ID NO: 4831 - protein, 450 aa, synthetic construct
  REGION 1..450: note = Ta_VH-CH/SIDE
EVQLVESGGGLVKPGGSLKLSCAASGYTFTSYVMHWVRQAPGKGLEWIGYINPYNDGTKYNEKFQGRVTISSDKSISTAYMELSSLRSEDTAMYYCARGTYYYGTRVFDYWGQGTLVTVSSASTKGPSVFPLAPSSKSTSGGTAALGCLVKDYFPEPVTVSWNSGALTSGVHTFPAVLQSSGLYSLSSVVTVPSSSLGTQTYICNVNHKPSNTKVDKKVEPKSCDKTHTCPPCPAPELLGGPDVFLFPPKPKDTLMISRTPEVTCVVVDVSHEDPEVQFNWYVDGVEVHNAKTKPREEQFNSTFRVVSVLTVVHQDWLNGKEYKCKVSNKALPAPEEKTISKTKGQPREPQVYTLPPSREEMTKNQVSLTCLVKGFYPSDIAVEWESNGQPENNYKTTPPMLDSDGSFFLYSKLTVDKSRWQQGNVFSCSVMHEALHNHYTQKSLSLSPG

SEQ ID NO: 4832 - protein, 453 aa, synthetic construct
  REGION 1..453: note = M971_VH-CH
QVQLQQSGPGLVKPSQTLSLTCAISGDSVSSNSAAWNWIRQSPSRGLEWLGRTYYRSKWYNDYAVSVKSRITINPDTSKNQFSLQLNSVTPEDTAVYYCAREVTGDLEDAFDIWGQGTMVTVSSASTKGPSVFPLAPSSKSTSGGTAALGCLVKDYFPEPVTVSWNSGALTSGVHTFPAVLQSSGLYSLSSVVTVPSSSLGTQTYICNVNHKPSNTKVDKKVEPKSCDKTHTCPPCPAPELLGGPSVFLFPPKPKDTLMISRTPEVTCVVVDVSHEDPEVKFNWYVDGVEVHNAKTKPREEQYNSTYRVVSVLTVLHQDWLNGKEYKCKVSNKALPAPIEKTISKAKGQPREPQVYTLPPSRDELTKNQVSLTCLVKGFYPSDIAVEWESNGQPENNYKTTPPVLDSDGSFFLYSKLTVDKSRWQQGNVFSCSVMHEALHNHYTQKSLSLSPG

SEQ ID NO: 4833 - protein, 453 aa, synthetic construct
  REGION 1..453: note = M971_VH-CH/SIDE
QVQLQQSGPGLVKPSQTLSLTCAISGDSVSSNSAAWNWIRQSPSRGLEWLGRTYYRSKWYNDYAVSVKSRITINPDTSKNQFSLQLNSVTPEDTAVYYCAREVTGDLEDAFDIWGQGTMVTVSSASTKGPSVFPLAPSSKSTSGGTAALGCLVKDYFPEPVTVSWNSGALTSGVHTFPAVLQSSGLYSLSSVVTVPSSSLGTQTYICNVNHKPSNTKVDKKVEPKSCDKTHTCPPCPAPELLGGPDVFLFPPKPKDTLMISRTPEVTCVVVDVSHEDPEVKFNWYVDGVEVHNAKTKPREEQYNSTYRVVSVLTVLHQDWLNGKEYKCKVSNKALPAPEEKTISKAKGQPREPQVYTLPPSRDELTKNQVSLTCLVKGFYPSDIAVEWESNGQPENNYKTTPPVLDSDGSFFLYSKLTVDKSRWQQGNVFSCSVMHEALHNHYTQKSLSLSPG

SEQ ID NO: 4834 - protein, 451 aa, synthetic construct
  REGION 1..451: note = Of_VH-CH
EVQLVESGGGLVQPGRSLRLSCAASGFTFNDYAMHWVRQAPGKGLEWVSTISWNSGSIGYADSVKGRFTISRDNAKKSLYLQMNSLRAEDTALYYCAKDIQYGNYYYGMDVWGQGTTVTVSSASTKGPSVFPLAPSSKSTSGGTAALGCLVKDYFPEPVTVSWNSGALTSGVHTFPAVLQSSGLYSLSSVVTVPSSSLGTQTYICNVNHKPSNTKVDKKVEPKSCDKTHTCPPCPAPELLGGPSVFLFPPKPKDTLMISRTPEVTCVVVDVSHEDPEVKFNWYVDGVEVHNAKTKPREEQYNSTYRVVSVLTVLHQDWLNGKEYKCKVSNKALPAPIEKTISKAKGQPREPQVYTLPPSRDELTKNQVSLTCLVKGFYPSDIAVEWESNGQPENNYKTTPPVLDSDGSFFLYSKLTVDKSRWQQGNVFSCSVMHEALHNHYTQKSLSLSPG

SEQ ID NO: 4835 - protein, 451 aa, synthetic construct
  REGION 1..451: note = Oc4041_VH-CH
EVQLVESGGGLVQPGGSLRLSCAASGYTFTSYNMHWVRQAPGKGLEWVGAIYPGNGDTSYNQKFKGRFTISVDKSKNTLYLQMNSLRAEDTAVYYCARVVYYSNSYWYFDVWGQGTLVTVSSASTKGPSVFPLAPSSKSTSGGTAALGCLVKDYFPEPVTVSWNSGALTSGVHTFPAVLQSSGLYSLSSVVTVPSSSLGTQTYICNVNHKPSNTKVDKKVEPKSCDKTHTCPPCPAPELLGGPSVFLFPPKPKDTLMISRTPEVTCVVVDVSHEDPEVKFNWYVDGVEVHNAKTKPREEQYNATYRVVSVLTVLHQDWLNGKEYKCKVSNKALPAPIAATISKAKGQPREPQVYTLPPSREEMTKNQVSLTCLVKGFYPSDIAVEWESNGQPENNYKTTPPVLDSDGSFFLYSKLTVDKSRWQQGNVFSCSVMHEALHNHYTQKSLSLSPG

SEQ ID NO: 4836 - protein, 448 aa, synthetic construct
  REGION 1..448: note = MoH1_VH-CH/N84G/hole
EVQLVQSGAEVKKPGASVKVSCKASGYTFTNYYIHWVRQAPGQGLEWIGWIYPGDGNTKYNEKFKGRATLTADTSTSTAYLELSSLRSEDTAVYYCARDSYSNYYFDYWGQGTLVTVSSASTKGPSVFPLAPSSKSTSGGTAALGCLVKDYFPEPVTVSWNSGALTSGVHTFPAVLQSSGLYSLSSVVTVPSSSLGTQTYICNVNHKPSNTKVDKKVEPKSCDKTHTCPPCPAPELLGGPSVFLFPPKPKDTLMISRTPEVTCVVVDVSHEDPEVKFNWYVDGVEVHNAKTKPREEQYGSTYRVVSVLTVLHQDWLNGKEYKCKVSNKALPAPIEKTISKAKGQPREPQVYTLPPSREEMTKNQVSLSCAVKGFYPSDIAVEWESNGQPENNYKTTPPVLDSDGSFFLVSKLTVDKSRWQQGNVFSCSVMHEALHNHYTQKSLSLSPG

SEQ ID NO: 4837 - protein, 451 aa, synthetic construct
  REGION 1..451: note = MoH2_VH-CH/N84G/knob
EVQLVESGGGLVQPGGSLRLSCAASGYTFTSYNMHWVRQAPGKGLEWVGAIYPGNGDTSYNQKFKGRFTISVDKSKNTLYLQMNSLRAEDTAVYYCARVVYYSNSYWYFDVWGQGTLVTVSSASTKGPSVFPLAPSSKSTSGGTAALGCLVKDYFPEPVTVSWNSGALTSGVHTFPAVLQSSGLYSLSSVVTVPSSSLGTQTYICNVNHKPSNTKVDKKVEPKSCDKTHTCPPCPAPELLGGPSVFLFPPKPKDTLMISRTPEVTCVVVDVSHEDPEVKFNWYVDGVEVHNAKTKPREEQYGSTYRVVSVLTVLHQDWLNGKEYKCKVSNKALPAPIEKTISKAKGQPREPQVYTLPPSREEMTKNQVSLWCLVKGFYPSDIAVEWESNGQPENNYKTTPPVLDSDGSFFLYSKLTVDKSRWQQGNVFSCSVMHEALHNHYTQKSLSLSPG

SEQ ID NO: 4838 - protein, 466 aa, synthetic construct
  REGION 1..466: note = TNFR1B_Fc
LPAQVAFTPYAPEPGSTCRLREYYDQTAQMCCSKCSPGQHAKVFCTKTSDTVCDSCEDSTYTQLWNWVPECLSCGSRCSSDQVETQACTREQNRICTCRPGWYCALSKQEGCRLCAPLRKCRPGFGVARPGTETSDVVCKPCAPGTFSNTTSSTDICRPHQICNVVAIPGNASMDAVCTSTSPTRSMAPGAVHLPQPVSTRSQHTQPTPEPSTAPSTSFLLPMGPSPPAEGSTGDEPKSCDKTHTCPPCPAPELLGGPSVFLFPPKPKDTLMISRTPEVTCVVVDVSHEDPEVKFNWYVDGVEVHNAKTKPREEQYNSTYRVVSVLTVLHQDWLNGKEYKCKVSNKALPAPIEKTISKAKGQPREPQVYTLPPSREEMTKNQVSLTCLVKGFYPSDIAVEWESNGQPENNYKTTPPVLDSDGSFFLYSKLTVDKSRWQQGNVFSCSVMHEALHNHYTQKSLSLSPG

SEQ ID NO: 4839 - protein, 450 aa, synthetic construct
  REGION 1..450: note = Ad_VH-CH
EVQLVESGGGLVQPGRSLRLSCAASGFTFDDYAMHWVRQAPGKGLEWVSAITWNSGHIDYADSVEGRFTISRDNAKNSLYLQMNSLRAEDTAVYYCAKVSYLSTASSLDYWGQGTLVTVSSASTKGPSVFPLAPSSKSTSGGTAALGCLVKDYFPEPVTVSWNSGALTSGVHTFPAVLQSSGLYSLSSVVTVPSSSLGTQTYICNVNHKPSNTKVDKKVEPKSCDKTHTCPPCPAPELLGGPSVFLFPPKPKDTLMISRTPEVTCVVVDVSHEDPEVKFNWYVDGVEVHNAKTKPREEQYNSTYRVVSVLTVLHQDWLNGKEYKCKVSNKALPAPIEKTISKAKGQPREPQVYTLPPSRDELTKNQVSLTCLVKGFYPSDIAVEWESNGQPENNYKTTPPVLDSDGSFFLYSKLTVDKSRWQQGNVFSCSVMHEALHNHYTQKSLSLSPG

SEQ ID NO: 4840 - protein, 450 aa, synthetic construct
  REGION 1..450: note = Ve_VH-CH
QVQLVQSGAEVKKPGASVKVSCKGSGYTFTSYWMHWVRQAPGQRLEWIGEIDPSESNTNYNQKFKGRVTLTVDISASTAYMELSSLRSEDTAVYYCARGGYDGWDYAIDYWGQGTLVTVSSASTKGPSVFPLAPSSKSTSGGTAALGCLVKDYFPEPVTVSWNSGALTSGVHTFPAVLQSSGLYSLSSVVTVPSSSLGTQTYICNVNHKPSNTKVDKKVEPKSCDKTHTCPPCPAPELAGAPSVFLFPPKPKDTLMISRTPEVTCVVVDVSHEDPEVKFNWYVDGVEVHNAKTKPREEQYNSTYRVVSVLTVLHQDWLNGKEYKCKVSNKALPAPIEKTISKAKGQPREPQVYTLPPSRDELTKNQVSLTCLVKGFYPSDIAVEWESNGQPENNYKTTPPVLDSDGSFFLYSKLTVDKSRWQQGNVFSCSVMHEALHNHYTQKSLSLSPG

SEQ ID NO: 4841 - protein, 448 aa, synthetic construct
  REGION 1..448: note = Us_VH-CH
EVQLVQSGAEVKKPGESLKISCKGSGYSFTTYWLGWVRQMPGKGLDWIGIMSPVDSDIRYSPSFQGQVTMSVDKSITTAYLQWNSLKASDTAMYYCARRRPGQGYFDFWGQGTLVTVSSSSTKGPSVFPLAPSSKSTSGGTAALGCLVKDYFPEPVTVSWNSGALTSGVHTFPAVLQSSGLYSLSSVVTVPSSSLGTQTYICNVNHKPSNTKVDKRVEPKSCDKTHTCPPCPAPELLGGPSVFLFPPKPKDTLMISRTPEVTCVVVDVSHEDPEVKFNWYVDGVEVHNAKTKPREEQYNSTYRVVSVLTVLHQDWLNGKEYKCKVSNKALPAPIEKTISKAKGQPREPQVYTLPPSRDELTKNQVSLTCLVKGFYPSDIAVEWESNGQPENNYKTTPPVLDSDGSFFLYSKLTVDKSRWQQGNVFSCSVMHEALHNHYTQKSLSLSPG

SEQ ID NO: 4842 - protein, 456 aa, synthetic construct
  REGION 1..456: note = Se_VH-CH
EVQLVESGGGLVQPGGSLRLSCAASGFTFSNYWMNWVRQAPGKGLEWVAAINQDGSEKYYVGSVKGRFTISRDNAKNSLYLQMNSLRVEDTAVYYCVRDYYDILTDYYIHYWYFDLWGRGTLVTVSSASTKGPSVFPLAPSSKSTSGGTAALGCLVKDYFPEPVTVSWNSGALTSGVHTFPAVLQSSGLYSLSSVVTVPSSSLGTQTYICNVNHKPSNTKVDKRVEPKSCDKTHTCPPCPAPELLGGPSVFLFPPKPKDTLMISRTPEVTCVVVDVSHEDPEVKFNWYVDGVEVHNAKTKPREEQYNSTYRVVSVLTVLHQDWLNGKEYKCKVSNKALPAPIEKTISKAKGQPREPQVYTLPPSREEMTKNQVSLTCLVKGFYPSDIAVEWESNGQPENNYKTTPPVLDSDGSFFLYSKLTVDKSRWQQGNVFSCSVMHEALHNHYTQKSLSLSPG

SEQ ID NO: 4843 - protein, 446 aa, synthetic construct
  REGION 1..446: note = Pe_VH-CH
QVQLVQSGVEVKKPGASVKVSCKASGYTFTNYYMYWVRQAPGQGLEWMGGINPSNGGTNFNEKFKNRVTLTTDSSTTTAYMELKSLQFDDTAVYYCARRDYRFDMGFDYWGQGTTVTVSSASTKGPSVFPLAPCSRSTSESTAALGCLVKDYFPEPVTVSWNSGALTSGVHTFPAVLQSSGLYSLSSVVTVPSSSLGTKTYTCNVDHKPSNTKVDKRVESKYGPPCPPCPAPEFLGGPSVFLFPPKPKDTLMISRTPEVTCVVVDVSQEDPEVQFNWYVDGVEVHNAKTKPREEQFNSTYRVVSVLTVLHQDWLNGKEYKCKVSNKGLPSSIEKTISKAKGQPREPQVYTLPPSQEEMTKNQVSLTCLVKGFYPSDIAVEWESNGQPENNYKTTPPVLDSDGSFFLYSRLTVDKSRWQEGNVFSCSVMHEALHNHYTQKSLSLSLG

SEQ ID NO: 4844 - protein, 447 aa, synthetic construct
  REGION 1..447: note = Ip_VH-CH
QVQLVESGGGVVQPGRSLRLSCAASGFTFSSYTMHWVRQAPGKGLEWVTFISYDGNNKYYADSVKGRFTISRDNSKNTLYLQMNSLRAEDTAIYYCARTGWLGPFDYWGQGTLVTVSSASTKGPSVFPLAPSSKSTSGGTAALGCLVKDYFPEPVTVSWNSGALTSGVHTFPAVLQSSGLYSLSSVVTVPSSSLGTQTYICNVNHKPSNTKVDKRVEPKSCDKTHTCPPCPAPELLGGPSVFLFPPKPKDTLMISRTPEVTCVVVDVSHEDPEVKFNWYVDGVEVHNAKTKPREEQYNSTYRVVSVLTVLHQDWLNGKEYKCKVSNKALPAPIEKTISKAKGQPREPQVYTLPPSRDELTKNQVSLTCLVKGFYPSDIAVEWESNGQPENNYKTTPPVLDSDGSFFLYSKLTVDKSRWQQGNVFSCSVMHEALHNHYTQKSLSLSPG

SEQ ID NO: 4845 - protein, 446 aa, synthetic construct
  REGION 1..446: note = 388D4-3_VH-CH
EVQLVQSGAEVKKPGASVKVSCKASGYTFTDYEMHWVRQAPGQGLEWMGIIDPGTGGTAYNQKFQGRVTMTADKSTSTVYMELSSLRSEDTAVYYCTSEKFGSNYYFDYWGQGTLVTVSSASTKGPSVFPLAPCSRSTSESTAALGCLVKDYFPEPVTVSWNSGALTSGVHTFPAVLQSSGLYSLSSVVTVPSSSLGTKTYTCNVDHKPSNTKVDKRVESKYGPPCPPCPAPEFLGGPSVFLFPPKPKDTLMISRTPEVTCVVVDVSQEDPEVQFNWYVDGVEVHNAKTKPREEQFNSTYRVVSVLTVLHQDWLNGKEYKCKVSNKGLPSSIEKTISKAKGQPREPQVYTLPPSQEEMTKNQVSLTCLVKGFYPSDIAVEWESNGQPENNYKTTPPVLDSDGSFFLYSRLTVDKSRWQEGNVFSCSVMHEALHNHYTQKSLSLSLG

SEQ ID NO: 4846 - protein, 446 aa, synthetic construct
  REGION 1..446: note = 244C8-2_VH-CH
QVQLVQSGAEVKKPGASVKVSCKASGYTFTSYWMHWVRQAPGQGLEWMGMIDPSNSETSLNQKFQGRVTMTVDKSTNTVYMELSSLRSEDTAVYYCARSRGNYAYEMDYWGQGTLVTVSSASTKGPSVFPLAPCSRSTSESTAALGCLVKDYFPEPVTVSWNSGALTSGVHTFPAVLQSSGLYSLSSVVTVPSSSLGTKTYTCNVDHKPSNTKVDKRVESKYGPPCPPCPAPEFLGGPSVFLFPPKPKDTLMISRTPEVTCVVVDVSQEDPEVQFNWYVDGVEVHNAKTKPREEQFNSTYRVVSVLTVLHQDWLNGKEYKCKVSNKGLPSSIEKTISKAKGQPREPQVYTLPPSQEEMTKNQVSLTCLVKGFYPSDIAVEWESNGQPENNYKTTPPVLDSDGSFFLYSRLTVDKSRWQEGNVFSCSVMHEALHNHYTQKSLSLSLG

SEQ ID NO: 4847 - protein, 447 aa, synthetic construct
  REGION 1..447: note = At_VH-CH/N297A
EVQLVESGGGLVQPGGSLRLSCAASGFTFSDSWIHWVRQAPGKGLEWVAWISPYGGSTYYADSVKGRFTISADTSKNTAYLQMNSLRAEDTAVYYCARRHWPGGFDYWGQGTLVTVSSASTKGPSVFPLAPSSKSTSGGTAALGCLVKDYFPEPVTVSWNSGALTSGVHTFPAVLQSSGLYSLSSVVTVPSSSLGTQTYICNVNHKPSNTKVDKKVEPKSCDKTHTCPPCPAPELLGGPSVFLFPPKPKDTLMISRTPEVTCVVVDVSHEDPEVKFNWYVDGVEVHNAKTKPREEQYASTYRVVSVLTVLHQDWLNGKEYKCKVSNKALPAPIEKTISKAKGQPREPQVYTLPPSREEMTKNQVSLTCLVKGFYPSDIAVEWESNGQPENNYKTTPPVLDSDGSFFLYSKLTVDKSRWQQGNVFSCSVMHEALHNHYTQKSLSLSPG

SEQ ID NO: 4848 - protein, 449 aa, synthetic construct
  REGION 1..449: note = B60-55_VH-CH/FES
QVQLVQSGAEVKKPASSVKVSCTASGGSFSTYAISWVRQAPGQGLEWMGGIIPIFGTTKYAQRFQGRVTITADESTTTAYMELSSLISDDTALYYCTTSRGFNYGWFDYWGQGTLVTVSSASTKGPSVFPLAPSSKSTSGGTAALGCLVKDYFPEPVTVSWNSGALTSGVHTFPAVLQSSGLYSLSSVVTVPSSSLGTQTYICNVNHKPSNTKVDKKVEPKSCDKTHTCPPCPAPELLGGPSVFLFPPKPKDTLMISRTPEVTCVVVDVSHEDPEVKFNWYVDGVEVHNAKTKPREEQYNSTYRVVSVLTVLHQDWLNGKEYKCKVSNKALPAPIEKTISKAKGQPREPQVYTLPPSRDELTKNQVSLTCLVKGFYPSDIAVEWESNGQPENNYKTTPPVLDSDGSFFLYSKLTVDKSRWQQGNVFSCSVMHEALHNHYTQKSLSLSPG

SEQ ID NO: 4849 - protein, 218 aa, synthetic construct
  REGION 1..218: note = ADG-20_VL-CL
QSVLTQPPSVSGAPGQRITISCTGSSSNIGAGYDVHWYQQLPGTAPKLLIYGSSSRNSGVPDRFSGSKSGTSASLAITGLQAEDEADYYCQSYDSSLSVLYTFGTGTKVTVLGQPKAAPSVTLFPPSSEELQANKATLVCLISDFYPGAVTVAWKADSSPVKAGVETTTPSKQSNNKYAASSYLSLTPEQWKSHRSYSCQVTHEGSTVEKTVAPTECS

SEQ ID NO: 4850 - protein, 219 aa, synthetic construct
  REGION 1..219: note = Ta_VK-Ck
DIVMTQSPATLSLSPGERATLSCRSSKSLQNVNGNTYLYWFQQKPGQSPQLLIYRMSNLNSGVPDRFSGSGSGTEFTLTISSLEPEDFAVYYCMQHLEYPITFGAGTKLEIKRTVAAPSVFIFPPSDEQLKSGTASVVCLLNNFYPREAKVQWKVDNALQSGNSQESVTEQDSKDSTYSLSSTLTLSKADYEKHKVYACEVTHQGLSSPVTKSFNRGEC

SEQ ID NO: 4851 - protein, 214 aa, synthetic construct
  REGION 1..214: note = M971_VK-Ck
DIQMTQSPSSLSASVGDRVTITCRASQTIWSYLNWYQQRPGKAPNLLIYAASSLQSGVPSRFSGRGSGTDFTLTISSLQAEDFATYYCQQSYSIPQTFGQGTKLEIKRTVAAPSVFIFPPSDEQLKSGTASVVCLLNNFYPREAKVQWKVDNALQSGNSQESVTEQDSKDSTYSLSSTLTLSKADYEKHKVYACEVTHQGLSSPVTKSFNRGEC

SEQ ID NO: 4852 - protein, 214 aa, synthetic construct
  REGION 1..214: note = Of_VK-CK
EIVLTQSPATLSLSPGERATLSCRASQSVSSYLAWYQQKPGQAPRLLIYDASNRATGIPARFSGSGSGTDFTLTISSLEPEDFAVYYCQQRSNWPITFGQGTRLEIKRTVAAPSVFIFPPSDEQLKSGTASVVCLLNNFYPREAKVQWKVDNALQSGNSQESVTEQDSKDSTYSLSSTLTLSKADYEKHKVYACEVTHQGLSSPVTKSFNRGEC

SEQ ID NO: 4853 - protein, 213 aa, synthetic construct
  REGION 1..213: note = Oc4041_VK-CK
DIQMTQSPSSLSASVGDRVTITCRASSSVSYMHWYQQKPGKAPKPLIYAPSNLASGVPSRFSGSGSGTDFTLTISSLQPEDFATYYCQQWSFNPPTFGQGTKVEIKRTVAAPSVFIFPPSDEQLKSGTASVVCLLNNFYPREAKVQWKVDNALQSGNSQESVTEQDSKDSTYSLSSTLTLSKADYEKHKVYACEVTHQGLSSPVTKSFNRGEC

SEQ ID NO: 4854 - protein, 219 aa, synthetic construct
  REGION 1..219: note = MoL1_VK-CK
DIVMTQSPDSLAVSLGERATINCKSSQSLLNSRTRKNYLAWYQQKPGQPPKLLIYWASTRESGVPDRFSGSGSGTDFTLTISSLQAEDVAVYYCTQSFILRTFGQGTKVEIKRTVAAPSVFIFPPSDEQLKSGTASVVCLLNNFYPREAKVQWKVDNALQSGNSQESVTEQDSKDSTYSLSSTLTLSKADYEKHKVYACEVTHQGLSSPVTKSFNRGEC

SEQ ID NO: 4855 - protein, 213 aa, synthetic construct; identical to SEQ ID NO: 4853
  REGION 1..213: note = MoL2_VK-CK

SEQ ID NO: 4856 - protein, 214 aa, synthetic construct; identical to SEQ ID NO: 238
  REGION 1..214: note = Ad_VK-CK

SEQ ID NO: 4857 - protein, 219 aa, synthetic construct
  REGION 1..219: note = Ve_VK-CK
DVVMTQSPLSLPVTPGEPASISCRSSQSLAKSYGNTYLSWYLQKPGQSPQLLIYGISNRFSGVPDRFSGSGSGTDFTLKISRVEAEDVGVYYCLQGTHQPYTFGQGTKVEIKRTVAAPSVFIFPPSDEQLKSGTASVVCLLNNFYPREAKVQWKVDNALQSGNSQESVTEQDSKDSTYSLSSTLTLSKADYEKHKVYACEVTHQGLSSPVTKSFNRGEC

SEQ ID NO: 4858 - protein, 214 aa, synthetic construct
  REGION 1..214: note = Us_VK-CK
DIQMTQSPSSLSASVGDRVTITCRASQGISSWLAWYQQKPEKAPKSLIYAASSLQSGVPSRFSGSGSGTDFTLTISSLQPEDFATYYCQQYNIYPYTFGQGTKLEIKRTVAAPSVFIFPPSDEQLKSGTASVVCLLNNFYPREAKVQWKVDNALQSGNSQESVTEQDSKDSTYSLSSTLTLSKADYEKHKVYACEVTHQGLSSPVTKSFNRGEC

SEQ ID NO: 4859 - protein, 215 aa, synthetic construct
  REGION 1..215: note = Se_VK-CK
EIVLTQSPGTLSLSPGERATLSCRASQSVSSSYLAWYQQKPGQAPRLLIYGASSRATGIPDRFSGSGSGTDFTLTISRLEPEDFAVYYCQQYGSSPCTFGQGTRLEIKRTVAAPSVFIFPPSDEQLKSGTASVVCLLNNFYPREAKVQWKVDNALQSGNSQESVTEQDSKDSTYSLSSTLTLSKADYEKHKVYACEVTHQGLSSPVTKSFNRGEC

SEQ ID NO: 4860 - protein, 218 aa, synthetic construct
  REGION 1..218: note = Pe_VK-CK
EIVLTQSPATLSLSPGERATLSCRASKGVSTSGYSYLHWYQQKPGQAPRLLIYLASYLESGVPARFSGSGSGTDFTLTISSLEPEDFAVYYCQHSRDLPLTFGGGTKVEIKRTVAAPSVFIFPPSDEQLKSGTASVVCLLNNFYPREAKVQWKVDNALQSGNSQESVTEQDSKDSTYSLSSTLTLSKADYEKHKVYACEVTHQGLSSPVTKSFNRGEC

SEQ ID NO: 4861 - protein, 215 aa, synthetic construct
  REGION 1..215: note = Ip_VK-CK
EIVLTQSPGTLSLSPGERATLSCRASQSVGSSYLAWYQQKPGQAPRLLIYGAFSRATGIPDRFSGSGSGTDFTLTISRLEPEDFAVYYCQQYGSSPWTFGQGTKVEIKRTVAAPSVFIFPPSDEQLKSGTASVVCLLNNFYPREAKVQWKVDNALQSGNSQESVTEQDSKDSTYSLSSTLTLSKADYEKHKVYACEVTHQGLSSPVTKSFNRGEC

SEQ ID NO: 4862 - protein, 219 aa, synthetic construct
  REGION 1..219: note = 388D4-3_VK-CK
DIVMTQTPLSSPVTLGQPASISCRSSQTIVHSDGNTYLEWYQQRPGQPPRLLIYKVSNRFSGVPDRFSGSGAGTDFTLKISRVEAEDVGVYYCFQGSHVPLTFGQGTKLEIKRTVAAPSVFIFPPSDEQLKSGTASVVCLLNNFYPREAKVQWKVDNALQSGNSQESVTEQDSKDSTYSLSSTLTLSKADYEKHKVYACEVTHQGLSSPVTKSFNRGEC

SEQ ID NO: 4863 - protein, 215 aa, synthetic construct
  REGION 1..215: note = 244C8-2_VK-CK
DIVLTQSPGTLSLSPGEKVTLSCRASSSVSSNYLYWYQQKPGQAPRLVIYSTSNLATGIPDRFSGSGSGTDYTLTISRLEPEDFAVYFCHQWSSYPPTFGQGTKVEIKRTVAAPSVFIFPPSDEQLKSGTASVVCLLNNFYPREAKVQWKVDNALQSGNSQESVTEQDSKDSTYSLSSTLTLSKADYEKHKVYACEVTHQGLSSPVTKSFNRGEC

SEQ ID NO: 4864 - protein, 214 aa, synthetic construct
  REGION 1..214: note = At_VK-CK
DIQMTQSPSSLSASVGDRVTITCRASQDVSTAVAWYQQKPGKAPKLLIYSASFLYSGVPSRFSGSGSGTDFTLTISSLQPEDFATYYCQQYLYHPATFGQGTKVEIKRTVAAPSVFIFPPSDEQLKSGTASVVCLLNNFYPREAKVQWKVDNALQSGNSQESVTEQDSKDSTYSLSSTLTLSKADYEKHKVYACEVTHQGLSSPVTKSFNRGEC

SEQ ID NO: 4865 - protein, 214 aa, synthetic construct
  REGION 1..214: note = B60-55_VK-CK
EIVMTQSPATLSLSPGERATLSCRASQSVGIHLAWYQQKLGQAPRLLIYGASSRATGIPDRFSGSGSGTDFTLTISRLEPEDFAVYYCQQYGSLPRTFGQGTKVEIKRTVAAPSVFIFPPSDEQLKSGTASVVCLLNNFYPREAKVQWKVDNALQSGNSQESVTEQDSKDSTYSLSSTLTLSKADYEKHKVYACEVTHQGLSSPVTKSFNRGEC

SEQ ID NO: 4866 - protein, 606 aa, synthetic construct
  REGION 1..606: note = Ad_VH-CH1/N84S/Q39K/S183E/CLD201/hole/RF
EVQLVESGGGLVQPGRSLRLSCAASGFTFDDYAMHWVRKAPGKGLEWVSAITWNSGHIDYADSVEGRFTISRDNAKNSLYLQMSSLRAEDTAVYYCAKVSYLSTASSLDYWGQGTLVTVSSASTKGPSVFPLAPSSKSTSGGTAALGCLVKDYFPEPVTVSWNSGALTSGVHTFPAVLQSSGLYSLESVVTVPSSSLGTQTYICNVNHKPSNTKVDKKVEPKSCTDWSPYADQSIKVRISLKSALGDKAYEWNDNEMYLFRSSVAYAMRQYFLKVKNQMILFGEEDVRVANLKPRISFNFFVTAPKNVSDIIPRTEVEKAIRMSRSRINDAFRLNDNSLEFLGIQPTLGPPNQPPVSTSTSPTRSMAPGAVHLPQPVSTRDKTHTCPPCPAPELLGGPSVFLFPPKPKDTLMISRTPEVTCVVVDVSHEDPEVKFNWYVDGVEVHNAKTKPREEQYNSTYRVVSVLTVLHQDWLNGKEYKCKVSNKALPAPIEKTISKAKGQPREPQVCTLPPSRDELTKNQVSLSCAVKGFYPSDIAVEWESNGQPENNYKTTPPVLDSDGSFFLVSKLTVDKSRWQQGNVFSCSVMHEALHNRFTQKSLSLSPG

SEQ ID NO: 4867 - protein, 438 aa, synthetic construct
  REGION 1..438: note = Us_VK-x-CH1/Q38E/S183K/knob
DIQMTQSPSSLSASVGDRVTITCRASQGISSWLAWYQKKPEKAPKSLIYAASSLQSGVPSRFSGSGSGTDFTLTISSLQPEDFATYYCQQYNIYPYTFGQGTKVEIKSSASTKGPSVFPLAPSSKSTSGGTAALGCLVKDYFPEPVTVSWNSGALTSGVHTFPAVLQSSGLYSLKSVVTVPSSSLGTQTYICNVNHKPSNTKVDKKVEPKSCDKTHTCPPCPAPELLGGPSVFLFPPKPKDTLMISRTPEVTCVVVDVSHEDPEVKFNWYVDGVEVHNAKTKPREEQYNSTYRVVSVLTVLHQDWLNGKEYKCKVSNKALPAPIEKTISKAKGQPREPQVYTLPPCRDELTKNQVSLWCLVKGFYPSDIAVEWESNGQPENNYKTTPPVLDSDGSFFLYSKLTVDKSRWQQGNVFSCSVMHEALHNHYTQKSLSLSPG

SEQ ID NO: 4868 - protein, 438 aa, synthetic construct
  REGION 1..438: note = Us_VK-x-CH1/Q38K/S183K/knob
DIQMTQSPSSLSASVGDRVTITCRASQGISSWLAWYQEKPEKAPKSLIYAASSLQSGVPSRFSGSGSGTDFTLTISSLQPEDFATYYCQQYNIYPYTFGQGTKVEIKSSASTKGPSVFPLAPSSKSTSGGTAALGCLVKDYFPEPVTVSWNSGALTSGVHTFPAVLQSSGLYSLKSVVTVPSSSLGTQTYICNVNHKPSNTKVDKKVEPKSCDKTHTCPPCPAPELLGGPSVFLFPPKPKDTLMISRTPEVTCVVVDVSHEDPEVKFNWYVDGVEVHNAKTKPREEQYNSTYRVVSVLTVLHQDWLNGKEYKCKVSNKALPAPIEKTISKAKGQPREPQVYTLPPCRDELTKNQVSLWCLVKGFYPSDIAVEWESNGQPENNYKTTPPVLDSDGSFFLYSKLTVDKSRWQQGNVFSCSVMHEALHNHYTQKSLSLSPG

SEQ ID NO: 4869 - protein, 606 aa, synthetic construct
  REGION 1..606: note = Ad_VH-CH1/N84S/Q39E/S183E/CLD201/hole/RF
EVQLVESGGGLVQPGRSLRLSCAASGFTFDDYAMHWVREAPGKGLEWVSAITWNSGHIDYADSVEGRFTISRDNAKNSLYLQMSSLRAEDTAVYYCAKVSYLSTASSLDYWGQGTLVTVSSASTKGPSVFPLAPSSKSTSGGTAALGCLVKDYFPEPVTVSWNSGALTSGVHTFPAVLQSSGLYSLESVVTVPSSSLGTQTYICNVNHKPSNTKVDKKVEPKSCTDWSPYADQSIKVRISLKSALGDKAYEWNDNEMYLFRSSVAYAMRQYFLKVKNQMILFGEEDVRVANLKPRISFNFFVTAPKNVSDIIPRTEVEKAIRMSRSRINDAFRLNDNSLEFLGIQPTLGPPNQPPVSTSTSPTRSMAPGAVHLPQPVSTRDKTHTCPPCPAPELLGGPSVFLFPPKPKDTLMISRTPEVTCVVVDVSHEDPEVKFNWYVDGVEVHNAKTKPREEQYNSTYRVVSVLTVLHQDWLNGKEYKCKVSNKALPAPIEKTISKAKGQPREPQVCTLPPSRDELTKNQVSLSCAVKGFYPSDIAVEWESNGQPENNYKTTPPVLDSDGSFFLVSKLTVDKSRWQQGNVFSCSVMHEALHNRFTQKSLSLSPG

SEQ ID NO: 4870 - protein, 604 aa, synthetic construct
  REGION 1..604: note = Us_VH-CH1/N84S/Q39K/S183E/CLD201/hole/RF
EVQLVQSGAEVKKPGESLKISCKGSGYSFTTYWLGWVRKMPGKGLDWIGIMSPVDSDIRYSPSFQGQVTMSVDKSITTAYLQWSSLKASDTAMYYCARRRPGQGYFDFWGQGTLVTVSSASTKGPSVFPLAPSSKSTSGGTAALGCLVKDYFPEPVTVSWNSGALTSGVHTFPAVLQSSGLYSLESVVTVPSSSLGTQTYICNVNHKPSNTKVDKKVEPKSCTDWSPYADQSIKVRISLKSALGDKAYEWNDNEMYLFRSSVAYAMRQYFLKVKNQMILFGEEDVRVANLKPRISFNFFVTAPKNVSDIIPRTEVEKAIRMSRSRINDAFRLNDNSLEFLGIQPTLGPPNQPPVSTSTSPTRSMAPGAVHLPQPVSTRDKTHTCPPCPAPELLGGPSVFLFPPKPKDTLMISRTPEVTCVVVDVSHEDPEVKFNWYVDGVEVHNAKTKPREEQYNSTYRVVSVLTVLHQDWLNGKEYKCKVSNKALPAPIEKTISKAKGQPREPQVCTLPPSRDELTKNQVSLSCAVKGFYPSDIAVEWESNGQPENNYKTTPPVLDSDGSFFLVSKLTVDKSRWQQGNVFSCSVMHEALHNRFTQKSLSLSPG

SEQ ID NO: 4871 - protein, 438 aa, synthetic construct
  REGION 1..438: note = Ad_VK-x-CH1/Q38E/S183K/knob
DIQMTQSPSSLSASVGDRVTITCRASQGIRNYLAWYQEKPGKAPKLLIYAASTLQSGVPSRFSGSGSGTDFTLTISSLQPEDVATYYCQRYNRAPYTFGQGTKVEIKSSASTKGPSVFPLAPSSKSTSGGTAALGCLVKDYFPEPVTVSWNSGALTSGVHTFPAVLQSSGLYSLKSVVTVPSSSLGTQTYICNVNHKPSNTKVDKKVEPKSCDKTHTCPPCPAPELLGGPSVFLFPPKPKDTLMISRTPEVTCVVVDVSHEDPEVKFNWYVDGVEVHNAKTKPREEQYNSTYRVVSVLTVLHQDWLNGKEYKCKVSNKALPAPIEKTISKAKGQPREPQVYTLPPCRDELTKNQVSLWCLVKGFYPSDIAVEWESNGQPENNYKTTPPVLDSDGSFFLYSKLTVDKSRWQQGNVFSCSVMHEALHNHYTQKSLSLSPG

SEQ ID NO: 4872 - protein, 438 aa, synthetic construct
  REGION 1..438: note = Ad_VK-x-CH1/Q38K/S183K/knob
DIQMTQSPSSLSASVGDRVTITCRASQGIRNYLAWYQKKPGKAPKLLIYAASTLQSGVPSRFSGSGSGTDFTLTISSLQPEDVATYYCQRYNRAPYTFGQGTKVEIKSSASTKGPSVFPLAPSSKSTSGGTAALGCLVKDYFPEPVTVSWNSGALTSGVHTFPAVLQSSGLYSLKSVVTVPSSSLGTQTYICNVNHKPSNTKVDKKVEPKSCDKTHTCPPCPAPELLGGPSVFLFPPKPKDTLMISRTPEVTCVVVDVSHEDPEVKFNWYVDGVEVHNAKTKPREEQYNSTYRVVSVLTVLHQDWLNGKEYKCKVSNKALPAPIEKTISKAKGQPREPQVYTLPPCRDELTKNQVSLWCLVKGFYPSDIAVEWESNGQPENNYKTTPPVLDSDGSFFLYSKLTVDKSRWQQGNVFSCSVMHEALHNHYTQKSLSLSPG

SEQ ID NO: 4873 - protein, 604 aa, synthetic construct
  REGION 1..604: note = Us_VH-CH1/N84S/Q39E/S183E/CLD201/hole/RF
EVQLVQSGAEVKKPGESLKISCKGSGYSFTTYWLGWVREMPGKGLDWIGIMSPVDSDIRYSPSFQGQVTMSVDKSITTAYLQWSSLKASDTAMYYCARRRPGQGYFDFWGQGTLVTVSSASTKGPSVFPLAPSSKSTSGGTAALGCLVKDYFPEPVTVSWNSGALTSGVHTFPAVLQSSGLYSLESVVTVPSSSLGTQTYICNVNHKPSNTKVDKKVEPKSCTDWSPYADQSIKVRISLKSALGDKAYEWNDNEMYLFRSSVAYAMRQYFLKVKNQMILFGEEDVRVANLKPRISFNFFVTAPKNVSDIIPRTEVEKAIRMSRSRINDAFRLNDNSLEFLGIQPTLGPPNQPPVSTSTSPTRSMAPGAVHLPQPVSTRDKTHTCPPCPAPELLGGPSVFLFPPKPKDTLMISRTPEVTCVVVDVSHEDPEVKFNWYVDGVEVHNAKTKPREEQYNSTYRVVSVLTVLHQDWLNGKEYKCKVSNKALPAPIEKTISKAKGQPREPQVCTLPPSRDELTKNQVSLSCAVKGFYPSDIAVEWESNGQPENNYKTTPPVLDSDGSFFLVSKLTVDKSRWQQGNVFSCSVMHEALHNRFTQKSLSLSPG

SEQ ID NO: 4874 - protein, 439 aa, synthetic construct
  REGION 1..439: note = Se_VK-x-CH1/Q38E/S183K/knob
EIVLTQSPGTLSLSPGERATLSCRASQSVSSSYLAWYQEKPGQAPRLLIYGASSRATGIPDRFSGSGSGTDFTLTISRLEPEDFAVYYCQQYGSSPCTFGQGTKVEIKSSASTKGPSVFPLAPSSKSTSGGTAALGCLVKDYFPEPVTVSWNSGALTSGVHTFPAVLQSSGLYSLKSVVTVPSSSLGTQTYICNVNHKPSNTKVDKKVEPKSCDKTHTCPPCPAPELLGGPSVFLFPPKPKDTLMISRTPEVTCVVVDVSHEDPEVKFNWYVDGVEVHNAKTKPREEQYNSTYRVVSVLTVLHQDWLNGKEYKCKVSNKALPAPIEKTISKAKGQPREPQVYTLPPCRDELTKNQVSLWCLVKGFYPSDIAVEWESNGQPENNYKTTPPVLDSDGSFFLYSKLTVDKSRWQQGNVFSCSVMHEALHNHYTQKSLSLSPG

SEQ ID NO: 4875 - protein, 439 aa, synthetic construct
  REGION 1..439: note = Se_VK-x-CH1/Q38K/S183K/knob
EIVLTQSPGTLSLSPGERATLSCRASQSVSSSYLAWYQKKPGQAPRLLIYGASSRATGIPDRFSGSGSGTDFTLTISRLEPEDFAVYYCQQYGSSPCTFGQGTKVEIKSSASTKGPSVFPLAPSSKSTSGGTAALGCLVKDYFPEPVTVSWNSGALTSGVHTFPAVLQSSGLYSLKSVVTVPSSSLGTQTYICNVNHKPSNTKVDKKVEPKSCDKTHTCPPCPAPELLGGPSVFLFPPKPKDTLMISRTPEVTCVVVDVSHEDPEVKFNWYVDGVEVHNAKTKPREEQYNSTYRVVSVLTVLHQDWLNGKEYKCKVSNKALPAPIEKTISKAKGQPREPQVYTLPPCRDELTKNQVSLWCLVKGFYPSDIAVEWESNGQPENNYKTTPPVLDSDGSFFLYSKLTVDKSRWQQGNVFSCSVMHEALHNHYTQKSLSLSPG

SEQ ID NO: 4876 - protein, 612 aa, synthetic construct
  REGION 1..612: note = Se_VH-CH1/N84S/Q39K/S183E/CLD201/hole/RF
EVQLVESGGGLVQPGGSLRLSCAASGFTFSNYWMNWVRKAPGKGLEWVAAINQDGSEKYYVGSVKGRFTISRDNAKNSLYLQMSSLRVEDTAVYYCVRDYYDILTDYYIHYWYFDLWGRGTLVTVSSASTKGPSVFPLAPSSKSTSGGTAALGCLVKDYFPEPVTVSWNSGALTSGVHTFPAVLQSSGLYSLESVVTVPSSSLGTQTYICNVNHKPSNTKVDKKVEPKSCTDWSPYADQSIKVRISLKSALGDKAYEWNDNEMYLFRSSVAYAMRQYFLKVKNQMILFGEEDVRVANLKPRISFNFFVTAPKNVSDIIPRTEVEKAIRMSRSRINDAFRLNDNSLEFLGIQPTLGPPNQPPVSTSTSPTRSMAPGAVHLPQPVSTRDKTHTCPPCPAPELLGGPSVFLFPPKPKDTLMISRTPEVTCVVVDVSHEDPEVKFNWYVDGVEVHNAKTKPREEQYNSTYRVVSVLTVLHQDWLNGKEYKCKVSNKALPAPIEKTISKAKGQPREPQVCTLPPSRDELTKNQVSLSCAVKGFYPSDIAVEWESNGQPENNYKTTPPVLDSDGSFFLVSKLTVDKSRWQQGNVFSCSVMHEALHNRFTQKSLSLSPG

SEQ ID NO: 4877 - protein, 612 aa, synthetic construct
  REGION 1..612: note = Se_VH-CH1/N84S/Q39E/S183E/CLD201/hole/RF
EVQLVESGGGLVQPGGSLRLSCAASGFTFSNYWMNWVREAPGKGLEWVAAINQDGSEKYYVGSVKGRFTISRDNAKNSLYLQMSSLRVEDTAVYYCVRDYYDILTDYYIHYWYFDLWGRGTLVTVSSASTKGPSVFPLAPSSKSTSGGTAALGCLVKDYFPEPVTVSWNSGALTSGVHTFPAVLQSSGLYSLESVVTVPSSSLGTQTYICNVNHKPSNTKVDKKVEPKSCTDWSPYADQSIKVRISLKSALGDKAYEWNDNEMYLFRSSVAYAMRQYFLKVKNQMILFGEEDVRVANLKPRISFNFFVTAPKNVSDIIPRTEVEKAIRMSRSRINDAFRLNDNSLEFLGIQPTLGPPNQPPVSTSTSPTRSMAPGAVHLPQPVSTRDKTHTCPPCPAPELLGGPSVFLFPPKPKDTLMISRTPEVTCVVVDVSHEDPEVKFNWYVDGVEVHNAKTKPREEQYNSTYRVVSVLTVLHQDWLNGKEYKCKVSNKALPAPIEKTISKAKGQPREPQVCTLPPSRDELTKNQVSLSCAVKGFYPSDIAVEWESNGQPENNYKTTPPVLDSDGSFFLVSKLTVDKSRWQQGNVFSCSVMHEALHNRFTQKSLSLSPG

SEQ ID NO: 4878 - protein, 606 aa, synthetic construct
  REGION 1..606: note = Ad_VH-CH1/N84S/Q39K/S183E/CLD201/hole/LALA/RF
EVQLVESGGGLVQPGRSLRLSCAASGFTFDDYAMHWVRKAPGKGLEWVSAITWNSGHIDYADSVEGRFTISRDNAKNSLYLQMSSLRAEDTAVYYCAKVSYLSTASSLDYWGQGTLVTVSSASTKGPSVFPLAPSSKSTSGGTAALGCLVKDYFPEPVTVSWNSGALTSGVHTFPAVLQSSGLYSLESVVTVPSSSLGTQTYICNVNHKPSNTKVDKKVEPKSCTDWSPYADQSIKVRISLKSALGDKAYEWNDNEMYLFRSSVAYAMRQYFLKVKNQMILFGEEDVRVANLKPRISFNFFVTAPKNVSDIIPRTEVEKAIRMSRSRINDAFRLNDNSLEFLGIQPTLGPPNQPPVSTSTSPTRSMAPGAVHLPQPVSTRDKTHTCPPCPAPEAAGGPSVFLFPPKPKDTLMISRTPEVTCVVVDVSHEDPEVKFNWYVDGVEVHNAKTKPREEQYNSTYRVVSVLTVLHQDWLNGKEYKCKVSNKALPAPIEKTISKAKGQPREPQVCTLPPSRDELTKNQVSLSCAVKGFYPSDIAVEWESNGQPENNYKTTPPVLDSDGSFFLVSKLTVDKSRWQQGNVFSCSVMHEALHNRFTQKSLSLSPG

SEQ ID NO: 4879 - protein, 443 aa, synthetic construct
  REGION 1..443: note = Ve_VK-x-CH1/Q38E/S183K/knob/LALA
DVVMTQSPLSLPVTPGEPASISCRSSQSLAKSYGNTYLSWYLEKPGQSPQLLIYGISNRFSGVPDRFSGSGSGTDFTLKISRVEAEDVGVYYCLQGTHQPYTFGQGTKVEIKSSASTKGPSVFPLAPSSKSTSGGTAALGCLVKDYFPEPVTVSWNSGALTSGVHTFPAVLQSSGLYSLKSVVTVPSSSLGTQTYICNVNHKPSNTKVDKKVEPKSCDKTHTCPPCPAPEAAGGPSVFLFPPKPKDTLMISRTPEVTCVVVDVSHEDPEVKFNWYVDGVEVHNAKTKPREEQYNSTYRVVSVLTVLHQDWLNGKEYKCKVSNKALPAPIEKTISKAKGQPREPQVYTLPPCRDELTKNQVSLWCLVKGFYPSDIAVEWESNGQPENNYKTTPPVLDSDGSFFLYSKLTVDKSRWQQGNVFSCSVMHEALHNHYTQKSLSLSPG

SEQ ID NO: 4880 - protein, 438 aa, synthetic construct
  REGION 1..438: note = Ve_VK-x-CH1/Q38K/S183K/knob/LALA
DVVMTQSPLSLPVTPGEPASISCRSSQSLAKSYGNTYLSWYLKKPGQSPQLLIYGISNRFSGVPDRFSGSGSGTDFTLKISRVEAEDVGVYYCLQGTHQPYTFGQGTKVEIKSSASTKGPSVFPLAPSSKSTSGGTAALGCLVKDYFPEPVTVSWNSGALTSGVHTFPAVLQSSGLYSLKSVVTVPSSSLGTQTYICNVNHKPSNTKVDKKVEPKSCDKTHTCPPCPAPEAAGGPSVFLFPPKPKDTLMISRTPEVTCVVVDVSHEDPEVKFNWYVDGVEVHNAKTKPREEQYNSTYRVVSVLTVLHQDWLNGKEYKCKVSNKALPAPIEKTGQPREPQVYTLPPCRDELTKNQVSLWCLVKGFYPSDIAVEWESNGQPENNYKTTPPVLDSDGSFFLYSKLTVDKSRWQQGNVFSCSVMHEALHNHYTQKSLSLSPG

SEQ ID NO: 4881 - protein, 601 aa, synthetic construct
  REGION 1..601: note = Ad_VH-CH1/N84S/Q39E/S183E/CLD201/hole/LALA/RF
EVQLVESGGGLVQPGRSLRLSCAASGFTFDDYAMHWVREAPGKGLEWVSAITWNSGHIDYADSVEGRFTISRDNAKNSLYLQMSSLRAEDTAVYYCAKVSYLSTASSLDYWGQGTLVTVSSASTKGPSVFPLAPSSKSTSGGTAALGCLVKDYFPEPVTVSWNSGALTSGVHTFPAVLQSSGLYSLESVVTVPSSSLGTQTYICNVNHKPSNTKVDKKVEPKSCTDWSPYADQSIKVRISLKSALGDKAYEWNDNEMYLFRSSVAYAMRQYFLKVKNQMILFGEEDVRVANLKPRISFNFFVTAPKNVSDIIPRTEVEKAIRMSRSRINDAFRLNDNSLEFLGIQPTLGPPNQPPVSTSTSPTRSMAPGAVHLPQPVSTRDKTHTCPPCPAPEAAGGPSVFLFPPKPKDTLMISRTPEVTCVVVDVSHEDPEVKFNWYVDGVEVHNAKTKPREEQYNSTYRVVSVLTVLHQDWLNGKEYKCKVSNKALPAPIEKTGQPREPQVCTLPPSRDELTKNQVSLSCAVKGFYPSDIAVEWESNGQPENNYKTTPPVLDSDGSFFLVSKLTVDKSRWQQGNVFSCSVMHEALHNRFTQKSLSLSPG

SEQ ID NO: 4882 - protein, 601 aa, synthetic construct
  REGION 1..601: note = Ve_VH-CH1/Q39K/S183E/CLD201/hole/LALA/RF
QVQLVQSGAEVKKPGASVKVSCKGSGYTFTSYWMHWVRKAPGQRLEWIGEIDPSESNTNYNQKFKGRVTLTVDISASTAYMELSSLRSEDTAVYYCARGGYDGWDYAIDYWGQGTLVTVSSASTKGPSVFPLAPSSKSTSGGTAALGCLVKDYFPEPVTVSWNSGALTSGVHTFPAVLQSSGLYSLESVVTVPSSSLGTQTYICNVNHKPSNTKVDKKVEPKSCTDWSPYADQSIKVRISLKSALGDKAYEWNDNEMYLFRSSVAYAMRQYFLKVKNQMILFGEEDVRVANLKPRISFNFFVTAPKNVSDIIPRTEVEKAIRMSRSRINDAFRLNDNSLEFLGIQPTLGPPNQPPVSTSTSPTRSMAPGAVHLPQPVSTRDKTHTCPPCPAPEAAGGPSVFLFPPKPKDTLMISRTPEVTCVVVDVSHEDPEVKFNWYVDGVEVHNAKTKPREEQYNSTYRVVSVLTVLHQDWLNGKEYKCKVSNKALPAPIEKTGQPREPQVCTLPPSRDELTKNQVSLSCAVKGFYPSDIAVEWESNGQPENNYKTTPPVLDSDGSFFLVSKLTVDKSRWQQGNVFSCSVMHEALHNRFTQKSLSLSPG

SEQ ID NO: 4883 - protein, 433 aa, synthetic construct
  REGION 1..433: note = Ad_VK-x-CH1/Q38E/S183K/knob/LALA
DIQMTQSPSSLSASVGDRVTITCRASQGIRNYLAWYQEKPGKAPKLLIYAASTLQSGVPSRFSGSGSGTDFTLTISSLQPEDVATYYCQRYNRAPYTFGQGTKVEIKSSASTKGPSVFPLAPSSKSTSGGTAALGCLVKDYFPEPVTVSWNSGALTSGVHTFPAVLQSSGLYSLKSVVTVPSSSLGTQTYICNVNHKPSNTKVDKKVEPKSCDKTHTCPPCPAPEAAGGPSVFLFPPKPKDTLMISRTPEVTCVVVDVSHEDPEVKFNWYVDGVEVHNAKTKPREEQYNSTYRVVSVLTVLHQDWLNGKEYKCKVSNKALPAPIEKTGQPREPQVYTLPPCRDELTKNQVSLWCLVKGFYPSDIAVEWESNGQPENNYKTTPPVLDSDGSFFLYSKLTVDKSRWQQGNVFSCSVMHEALHNHYTQKSLSLSPG

SEQ ID NO: 4884 - protein, 433 aa, synthetic construct
  REGION 1..433: note = Ad_VK-x-CH1/Q38K/S183K/knob/LALA
DIQMTQSPSSLSASVGDRVTITCRASQGIRNYLAWYQKKPGKAPKLLIYAASTLQSGVPSRFSGSGSGTDFTLTISSLQPEDVATYYCQRYNRAPYTFGQGTKVEIKSSASTKGPSVFPLAPSSKSTSGGTAALGCLVKDYFPEPVTVSWNSGALTSGVHTFPAVLQSSGLYSLKSVVTVPSSSLGTQTYICNVNHKPSNTKVDKKVEPKSCDKTHTCPPCPAPEAAGGPSVFLFPPKPKDTLMISRTPEVTCVVVDVSHEDPEVKFNWYVDGVEVHNAKTKPREEQYNSTYRVVSVLTVLHQDWLNGKEYKCKVSNKALPAPIEKTGQPREPQVYTLPPCRDELTKNQVSLWCLVKGFYPSDIAVEWESNGQPENNYKTTPPVLDSDGSFFLYSKLTVDKSRWQQGNVFSCSVMHEALHNHYTQKSLSLSPG

SEQ ID NO: 4885 - protein, 601 aa, synthetic construct
  REGION 1..601: note = Ve_VH-CH1/Q39E/S183E/CLD201/hole/LALA/RF
QVQLVQSGAEVKKPGASVKVSCKGSGYTFTSYWMHWVREAPGQRLEWIGEIDPSESNTNYNQKFKGRVTLTVDISASTAYMELSSLRSEDTAVYYCARGGYDGWDYAIDYWGQGTLVTVSSASTKGPSVFPLAPSSKSTSGGTAALGCLVKDYFPEPVTVSWNSGALTSGVHTFPAVLQSSGLYSLESVVTVPSSSLGTQTYICNVNHKPSNTKVDKKVEPKSCTDWSPYADQSIKVRISLKSALGDKAYEWNDNEMYLFRSSVAYAMRQYFLKVKNQMILFGEEDVRVANLKPRISFNFFVTAPKNVSDIIPRTEVEKAIRMSRSRINDAFRLNDNSLEFLGIQPTLGPPNQPPVSTSTSPTRSMAPGAVHLPQPVSTRDKTHTCPPCPAPEAAGGPSVFLFPPKPKDTLMISRTPEVTCVVVDVSHEDPEVKFNWYVDGVEVHNAKTKPREEQYNSTYRVVSVLTVLHQDWLNGKEYKCKVSNKALPAPIEKTGQPREPQVCTLPPSRDELTKNQVSLSCAVKGFYPSDIAVEWESNGQPENNYKTTPPVLDSDGSFFLVSKLTVDKSRWQQGNVFSCSVMHEALHNRFTQKSLSLSPG

SEQ ID NO: 4886 - protein, 807 aa, synthetic construct
  REGION 1..807: note = TNFR1B_201/CLD201/Ad_VH-CH/N84S/hole/RF
LPAQVAFTPYAPEPGSTCRLREYYDQTAQMCCSKCSPGQHAKVFCTKTSDTVCDSCEDSTYTQLWNWVPECLSCGSRCSSDQVETQACTREQNRICTCRPGWYCALSKQEGCRLCAPLRKCRPGFGVARPGTETSDVVCKPCAPGTFSNTTSSTDICRPHQICNVVAIPGNASMDAVCTSTSPTRSMAPGAVHLPQPVSTRTDWSPYADQSIKVRISLKSALGDKAYEWNDNEMYLFRSSVAYAMRQYFLKVKNQMILFGEEDVRVANLKPRISFNFFVTAPKNVSDIIPRTEVEKAIRMSRSRINDAFRLNDNSLEFLGIQPTLGPPNQPPVSTSTSPTRSMAPGAVHLPQPVSTREVQLVESGGGLVQPGRSLRLSCAASGFTFDDYAMHWVRQAPGKGLEWVSAITWNSGHIDYADSVEGRFTISRDNAKNSLYLQMSSLRAEDTAVYYCAKVSYLSTASSLDYWGQGTLVTVSSASTKGPSVFPLAPSSKSTSGGTAALGCLVKDYFPEPVTVSWNSGALTSGVHTFPAVLQSSGLYSLSSVVTVPSSSLGTQTYICNVNHKPSNTKVDKKVEPKSCDKTHTCPPCPAPELLGGPSVFLFPPKPKDTLMISRTPEVTCVVVDVSHEDPEVKFNWYVDGVEVHNAKTKPREEQYNSTYRVVSVLTVLHQDWLNGKEYKCKVSNKALPAPIEKTISKAKGQPREPQVCTLPPSRDELTKNQVSLSCAVKGFYPSDIAVEWESNGQPENNYKTTPPVLDSDGSFFLVSKLTVDKSRWQQGNVFSCSVMHEALHNRFTQKSLSLSPG

SEQ ID NO: 4887 - protein, 795 aa, synthetic construct
  REGION 1..795: note = TNFR1B_201/CLD201/Ad_VK-x-CH/hole/RF
LPAQVAFTPYAPEPGSTCRLREYYDQTAQMCCSKCSPGQHAKVFCTKTSDTVCDSCEDSTYTQLWNWVPECLSCGSRCSSDQVETQACTREQNRICTCRPGWYCALSKQEGCRLCAPLRKCRPGFGVARPGTETSDVVCKPCAPGTFSNTTSSTDICRPHQICNVVAIPGNASMDAVCTSTSPTRSMAPGAVHLPQPVSTRTDWSPYADQSIKVRISLKSALGDKAYEWNDNEMYLFRSSVAYAMRQYFLKVKNQMILFGEEDVRVANLKPRISFNFFVTAPKNVSDIIPRTEVEKAIRMSRSRINDAFRLNDNSLEFLGIQPTLGPPNQPPVSTSTSPTRSMAPGAVHLPQPVSTRDIQMTQSPSSLSASVGDRVTITCRASQGIRNYLAWYQQKPGKAPKLLIYAASTLQSGVPSRFSGSGSGTDFTLTISSLQPEDVATYYCQRYNRAPYTFGQGTKVEIKSSASTKGPSVFPLAPSSKSTSGGTAALGCLVKDYFPEPVTVSWNSGALTSGVHTFPAVLQSSGLYSLSSVVTVPSSSLGTQTYICNVNHKPSNTKVDKKVEPKSCDKTHTCPPCPAPELLGGPSVFLFPPKPKDTLMISRTPEVTCVVVDVSHEDPEVKFNWYVDGVEVHNAKTKPREEQYNSTYRVVSVLTVLHQDWLNGKEYKCKVSNKALPAPIEKTISKAKGQPREPQVCTLPPSRDELTKNQVSLSCAVKGFYPSDIAVEWESNGQPENNYKTTPPVLDSDGSFFLVSKLTVDKSRWQQGNVFSCSVMHEALHNRFTQKSLSLSPG

SEQ ID NO: 4888 - protein, 805 aa, synthetic construct
  REGION 1..805: note = TNFR1B_201/CLD201/Us_VH-CH/N84S/hole/RF
LPAQVAFTPYAPEPGSTCRLREYYDQTAQMCCSKCSPGQHAKVFCTKTSDTVCDSCEDSTYTQLWNWVPECLSCGSRCSSDQVETQACTREQNRICTCRPGWYCALSKQEGCRLCAPLRKCRPGFGVARPGTETSDVVCKPCAPGTFSNTTSSTDICRPHQICNVVAIPGNASMDAVCTSTSPTRSMAPGAVHLPQPVSTRTDWSPYADQSIKVRISLKSALGDKAYEWNDNEMYLFRSSVAYAMRQYFLKVKNQMILFGEEDVRVANLKPRISFNFFVTAPKNVSDIIPRTEVEKAIRMSRSRINDAFRLNDNSLEFLGIQPTLGPPNQPPVSTSTSPTRSMAPGAVHLPQPVSTREVQLVQSGAEVKKPGESLKISCKGSGYSFTTYWLGWVRQMPGKGLDWIGIMSPVDSDIRYSPSFQGQVTMSVDKSITTAYLQWSSLKASDTAMYYCARRRPGQGYFDFWGQGTLVTVSSSSTKGPSVFPLAPSSKSTSGGTAALGCLVKDYFPEPVTVSWNSGALTSGVHTFPAVLQSSGLYSLSSVVTVPSSSLGTQTYICNVNHKPSNTKVDKRVEPKSCDKTHTCPPCPAPELLGGPSVFLFPPKPKDTLMISRTPEVTCVVVDVSHEDPEVKFNWYVDGVEVHNAKTKPREEQYNSTYRVVSVLTVLHQDWLNGKEYKCKVSNKALPAPIEKTISKAKGQPREPQVCTLPPSRDELTKNQVSLSCAVKGFYPSDIAVEWESNGQPENNYKTTPPVLDSDGSFFLVSKLTVDKSRWQQGNVFSCSVMHEALHNRFTQKSLSLSPG

SEQ ID NO: 4889 - protein, 795 aa, synthetic construct
  REGION 1..795: note = TNFR1B_201/CLD201/Us_VK-x-CH/hole/RF
LPAQVAFTPYAPEPGSTCRLREYYDQTAQMCCSKCSPGQHAKVFCTKTSDTVCDSCEDSTYTQLWNWVPECLSCGSRCSSDQVETQACTREQNRICTCRPGWYCALSKQEGCRLCAPLRKCRPGFGVARPGTETSDVVCKPCAPGTFSNTTSSTDICRPHQICNVVAIPGNASMDAVCTSTSPTRSMAPGAVHLPQPVSTRTDWSPYADQSIKVRISLKSALGDKAYEWNDNEMYLFRSSVAYAMRQYFLKVKNQMILFGEEDVRVANLKPRISFNFFVTAPKNVSDIIPRTEVEKAIRMSRSRINDAFRLNDNSLEFLGIQPTLGPPNQPPVSTSTSPTRSMAPGAVHLPQPVSTRDIQMTQSPSSLSASVGDRVTITCRASQGISSWLAWYQQKPEKAPKSLIYAASSLQSGVPSRFSGSGSGTDFTLTISSLQPEDFATYYCQQYNIYPYTFGQGTKVEIKSSSSTKGPSVFPLAPSSKSTSGGTAALGCLVKDYFPEPVTVSWNSGALTSGVHTFPAVLQSSGLYSLSSVVTVPSSSLGTQTYICNVNHKPSNTKVDKRVEPKSCDKTHTCPPCPAPELLGGPSVFLFPPKPKDTLMISRTPEVTCVVVDVSHEDPEVKFNWYVDGVEVHNAKTKPREEQYNSTYRVVSVLTVLHQDWLNGKEYKCKVSNKALPAPIEKTISKAKGQPREPQVCTLPPSRDELTKNQVSLSCAVKGFYPSDIAVEWESNGQPENNYKTTPPVLDSDGSFFLVSKLTVDKSRWQQGNVFSCSVMHEALHNRFTQKSLSLSPG

SEQ ID NO: 4890 - protein, 813 aa, synthetic construct
  REGION 1..813: note = TNFR1B_201/CLD201/Se_VH-CH/N84S/hole/RF
LPAQVAFTPYAPEPGSTCRLREYYDQTAQMCCSKCSPGQHAKVFCTKTSDTVCDSCEDSTYTQLWNWVPECLSCGSRCSSDQVETQACTREQNRICTCRPGWYCALSKQEGCRLCAPLRKCRPGFGVARPGTETSDVVCKPCAPGTFSNTTSSTDICRPHQICNVVAIPGNASMDAVCTSTSPTRSMAPGAVHLPQPVSTRTDWSPYADQSIKVRISLKSALGDKAYEWNDNEMYLFRSSVAYAMRQYFLKVKNQMILFGEEDVRVANLKPRISFNFFVTAPKNVSDIIPRTEVEKAIRMSRSRINDAFRLNDNSLEFLGIQPTLGPPNQPPVSTSTSPTRSMAPGAVHLPQPVSTREVQLVESGGGLVQPGGSLRLSCAASGFTFSNYWMNWVRQAPGKGLEWVAAINQDGSEKYYVGSVKGRFTISRDNAKNSLYLQMSSLRVEDTAVYYCVRDYYDILTDYYIHYWYFDLWGRGTLVTVSSASTKGPSVFPLAPSSKSTSGGTAALGCLVKDYFPEPVTVSWNSGALTSGVHTFPAVLQSSGLYSLSSVVTVPSSSLGTQTYICNVNHKPSNTKVDKRVEPKSCDKTHTCPPCPAPELLGGPSVFLFPPKPKDTLMISRTPEVTCVVVDVSHEDPEVKFNWYVDGVEVHNAKTKPREEQYNSTYRVVSVLTVLHQDWLNGKEYKCKVSNKALPAPIEKTISKAKGQPREPQVCTLPPSRDELTKNQVSLSCAVKGFYPSDIAVEWESNGQPENNYKTTPPVLDSDGSFFLVSKLTVDKSRWQQGNVFSCSVMHEALHNRFTQKSLSLSPG

SEQ ID NO: 4891 - protein, 796 aa, synthetic construct
  REGION 1..796: note = TNFR1B_201/CLD201/Se_VK-x-CH/hole/RF
LPAQVAFTPYAPEPGSTCRLREYYDQTAQMCCSKCSPGQHAKVFCTKTSDTVCDSCEDSTYTQLWNWVPECLSCGSRCSSDQVETQACTREQNRICTCRPGWYCALSKQEGCRLCAPLRKCRPGFGVARPGTETSDVVCKPCAPGTFSNTTSSTDICRPHQICNVVAIPGNASMDAVCTSTSPTRSMAPGAVHLPQPVSTRTDWSPYADQSIKVRISLKSALGDKAYEWNDNEMYLFRSSVAYAMRQYFLKVKNQMILFGEEDVRVANLKPRISFNFFVTAPKNVSDIIPRTEVEKAIRMSRSRINDAFRLNDNSLEFLGIQPTLGPPNQPPVSTSTSPTRSMAPGAVHLPQPVSTREIVLTQSPGTLSLSPGERATLSCRASQSVSSSYLAWYQQKPGQAPRLLIYGASSRATGIPDRFSGSGSGTDFTLTISRLEPEDFAVYYCQQYGSSPCTFGQGTKVEIKSSASTKGPSVFPLAPSSKSTSGGTAALGCLVKDYFPEPVTVSWNSGALTSGVHTFPAVLQSSGLYSLSSVVTVPSSSLGTQTYICNVNHKPSNTKVDKRVEPKSCDKTHTCPPCPAPELLGGPSVFLFPPKPKDTLMISRTPEVTCVVVDVSHEDPEVKFNWYVDGVEVHNAKTKPREEQYNSTYRVVSVLTVLHQDWLNGKEYKCKVSNKALPAPIEKTISKAKGQPREPQVCTLPPSRDELTKNQVSLSCAVKGFYPSDIAVEWESNGQPENNYKTTPPVLDSDGSFFLVSKLTVDKSRWQQGNVFSCSVMHEALHNRFTQKSLSLSPG

SEQ ID NO: 4892 - protein, 807 aa, synthetic construct
  REGION 1..807: note = TNFR1B_201/CLD201/Ve_VH-CH/hole/LALA/RF
LPAQVAFTPYAPEPGSTCRLREYYDQTAQMCCSKCSPGQHAKVFCTKTSDTVCDSCEDSTYTQLWNWVPECLSCGSRCSSDQVETQACTREQNRICTCRPGWYCALSKQEGCRLCAPLRKCRPGFGVARPGTETSDVVCKPCAPGTFSNTTSSTDICRPHQICNVVAIPGNASMDAVCTSTSPTRSMAPGAVHLPQPVSTRTDWSPYADQSIKVRISLKSALGDKAYEWNDNEMYLFRSSVAYAMRQYFLKVKNQMILFGEEDVRVANLKPRISFNFFVTAPKNVSDIIPRTEVEKAIRMSRSRINDAFRLNDNSLEFLGIQPTLGPPNQPPVSTSTSPTRSMAPGAVHLPQPVSTRQVQLVQSGAEVKKPGASVKVSCKGSGYTFTSYWMHWVRQAPGQRLEWIGEIDPSESNTNYNQKFKGRVTLTVDISASTAYMELSSLRSEDTAVYYCARGGYDGWDYAIDYWGQGTLVTVSSASTKGPSVFPLAPSSKSTSGGTAALGCLVKDYFPEPVTVSWNSGALTSGVHTFPAVLQSSGLYSLSSVVTVPSSSLGTQTYICNVNHKPSNTKVDKKVEPKSCDKTHTCPPCPAPEAAGGPSVFLFPPKPKDTLMISRTPEVTCVVVDVSHEDPEVKFNWYVDGVEVHNAKTKPREEQYNSTYRVVSVLTVLHQDWLNGKEYKCKVSNKALPAPIEKTISKAKGQPREPQVCTLPPSRDELTKNQVSLSCAVKGFYPSDIAVEWESNGQPENNYKTTPPVLDSDGSFFLVSKLTVDKSRWQQGNVFSCSVMHEALHNRFTQKSLSLSPG

SEQ ID NO: 4893 - protein, 800 aa, synthetic construct
  REGION 1..800: note = TNFR1B_201/CLD201/Ve_VK-x-CH/hole/LALA/RF
LPAQVAFTPYAPEPGSTCRLREYYDQTAQMCCSKCSPGQHAKVFCTKTSDTVCDSCEDSTYTQLWNWVPECLSCGSRCSSDQVETQACTREQNRICTCRPGWYCALSKQEGCRLCAPLRKCRPGFGVARPGTETSDVVCKPCAPGTFSNTTSSTDICRPHQICNVVAIPGNASMDAVCTSTSPTRSMAPGAVHLPQPVSTRTDWSPYADQSIKVRISLKSALGDKAYEWNDNEMYLFRSSVAYAMRQYFLKVKNQMILFGEEDVRVANLKPRISFNFFVTAPKNVSDIIPRTEVEKAIRMSRSRINDAFRLNDNSLEFLGIQPTLGPPNQPPVSTSTSPTRSMAPGAVHLPQPVSTRDVVMTQSPLSLPVTPGEPASISCRSSQSLAKSYGNTYLSWYLQKPGQSPQLLIYGISNRFSGVPDRFSGSGSGTDFTLKISRVEAEDVGVYYCLQGTHQPYTFGQGTKVEIKSSASTKGPSVFPLAPSSKSTSGGTAALGCLVKDYFPEPVTVSWNSGALTSGVHTFPAVLQSSGLYSLSSVVTVPSSSLGTQTYICNVNHKPSNTKVDKKVEPKSCDKTHTCPPCPAPEAAGGPSVFLFPPKPKDTLMISRTPEVTCVVVDVSHEDPEVKFNWYVDGVEVHNAKTKPREEQYNSTYRVVSVLTVLHQDWLNGKEYKCKVSNKALPAPIEKTISKAKGQPREPQVCTLPPSRDELTKNQVSLSCAVKGFYPSDIAVEWESNGQPENNYKTTPPVLDSDGSFFLVSKLTVDKSRWQQGNVFSCSVMHEALHNRFTQKSLSLSPG

SEQ ID NO: 4894 - protein, 214 aa, synthetic construct
  REGION 1..214: note = Ad_VK-CK/Q38E/V133K
DIQMTQSPSSLSASVGDRVTITCRASQGIRNYLAWYQEKPGKAPKLLIYAASTLQSGVPSRFSGSGSGTDFTLTISSLQPEDVATYYCQRYNRAPYTFGQGTKVEIKRTVAAPSVFIFPPSDEQLKSGTASVKCLLNNFYPREAKVQWKVDNALQSGNSQESVTEQDSKDSTYSLSSTLTLSKADYEKHKVYACEVTHQGLSSPVTKSFNRGEC

SEQ ID NO: 4895 - protein, 226 aa, synthetic construct
  REGION 1..226: note = Us_VH-x-CK/N84S/Q39K/V133E
EVQLVQSGAEVKKPGESLKISCKGSGYSFTTYWLGWVRKMPGKGLDWIGIMSPVDSDIRYSPSFQGQVTMSVDKSITTAYLQWSSLKASDTAMYYCARRRPGQGYFDFWGQGTLVTVSSASVAAPSVFIFPPSDEQLKSGTASVECLLNNFYPREAKVQWKVDNALQSGNSQESVTEQDSKDSTYSLSSTLTLSKADYEKHKVYACEVTHQGLSSPVTKSFNRGEC

SEQ ID NO: 4896 - protein, 226 aa, synthetic construct
  REGION 1..226: note = Us_VH-x-CK/N84S/Q39E/V133E
EVQLVQSGAEVKKPGESLKISCKGSGYSFTTYWLGWVREMPGKGLDWIGIMSPVDSDIRYSPSFQGQVTMSVDKSITTAYLQWSSLKASDTAMYYCARRRPGQGYFDFWGQGTLVTVSSASVAAPSVFIFPPSDEQLKSGTASVECLLNNFYPREAKVQWKVDNALQSGNSQESVTEQDSKDSTYSLSSTLTLSKADYEKHKVYACEVTHQGLSSPVTKSFNRGEC

SEQ ID NO: 4897 - protein, 214 aa, synthetic construct
  REGION 1..214: note = Ad_VK-CK/Q38K/V133K
DIQMTQSPSSLSASVGDRVTITCRASQGIRNYLAWYQKKPGKAPKLLIYAASTLQSGVPSRFSGSGSGTDFTLTISSLQPEDVATYYCQRYNRAPYTFGQGTKVEIKRTVAAPSVFIFPPSDEQLKSGTASVKCLLNNFYPREAKVQWKVDNALQSGNSQESVTEQDSKDSTYSLSSTLTLSKADYEKHKVYACEVTHQGLSSPVTKSFNRGEC

SEQ ID NO: 4898 - protein, 214 aa, synthetic construct
  REGION 1..214: note = Us_VK-CK/Q38E/V133K
DIQMTQSPSSLSASVGDRVTITCRASQGISSWLAWYQEKPEKAPKSLIYAASSLQSGVPSRFSGSGSGTDFTLTISSLQPEDFATYYCQQYNIYPYTFGQGTKLEIKRTVAAPSVFIFPPSDEQLKSGTASVKCLLNNFYPREAKVQWKVDNALQSGNSQESVTEQDSKDSTYSLSSTLTLSKADYEKHKVYACEVTHQGLSSPVTKSFNRGEC

SEQ ID NO: 4899 - protein, 228 aa, synthetic construct
  REGION 1..228: note = Ad_VH-x-CK/N84S/Q39K/V133E
EVQLVESGGGLVQPGRSLRLSCAASGFTFDDYAMHWVRKAPGKGLEWVSAITWNSGHIDYADSVEGRFTISRDNAKNSLYLQMSSLRAEDTAVYYCAKVSYLSTASSLDYWGQGTLVTVSSASVAAPSVFIFPPSDEQLKSGTASVECLLNNFYPREAKVQWKVDNALQSGNSQESVTEQDSKDSTYSLSSTLTLSKADYEKHKVYACEVTHQGLSSPVTKSFNRGEC

SEQ ID NO: 4900 - protein, 228 aa, synthetic construct
  REGION 1..228: note = Ad_VH-x-CK/N84S/Q39E/V133E
EVQLVESGGGLVQPGRSLRLSCAASGFTFDDYAMHWVREAPGKGLEWVSAITWNSGHIDYADSVEGRFTISRDNAKNSLYLQMSSLRAEDTAVYYCAKVSYLSTASSLDYWGQGTLVTVSSASVAAPSVFIFPPSDEQLKSGTASVECLLNNFYPREAKVQWKVDNALQSGNSQESVTEQDSKDSTYSLSSTLTLSKADYEKHKVYACEVTHQGLSSPVTKSFNRGEC

SEQ ID NO: 4901 - protein, 214 aa, synthetic construct
  REGION 1..214: note = Us_VK-CK/Q38K/V133K
DIQMTQSPSSLSASVGDRVTITCRASQGISSWLAWYQKKPEKAPKSLIYAASSLQSGVPSRFSGSGSGTDFTLTISSLQPEDFATYYCQQYNIYPYTFGQGTKLEIKRTVAAPSVFIFPPSDEQLKSGTASVKCLLNNFYPREAKVQWKVDNALQSGNSQESVTEQDSKDSTYSLSSTLTLSKADYEKHKVYACEVTHQGLSSPVTKSFNRGEC

SEQ ID NO: 4902 - protein, 234 aa, synthetic construct
  REGION 1..234: note = Se_VH-x-CK/N84S/Q39K/V133E
EVQLVESGGGLVQPGGSLRLSCAASGFTFSNYWMNWVRKAPGKGLEWVAAINQDGSEKYYVGSVKGRFTISRDNAKNSLYLQMSSLRVEDTAVYYCVRDYYDILTDYYIHYWYFDLWGRGTLVTVSSASVAAPSVFIFPPSDEQLKSGTASVECLLNNFYPREAKVQWKVDNALQSGNSQESVTEQDSKDSTYSLSSTLTLSKADYEKHKVYACEVTHQGLSSPVTKSFNRGEC

SEQ ID NO: 4903 - protein, 234 aa, synthetic construct
  REGION 1..234: note = Se_VH-x-CK/N84S/Q39E/V133E
EVQLVESGGGLVQPGGSLRLSCAASGFTFSNYWMNWVREAPGKGLEWVAAINQDGSEKYYVGSVKGRFTISRDNAKNSLYLQMSSLRVEDTAVYYCVRDYYDILTDYYIHYWYFDLWGRGTLVTVSSASVAAPSVFIFPPSDEQLKSGTASVECLLNNFYPREAKVQWKVDNALQSGNSQESVTEQDSKDSTYSLSSTLTLSKADYEKHKVYACEVTHQGLSSPVTKSFNRGEC

SEQ ID NO: 4904 - protein, 215 aa, synthetic construct
  REGION 1..215: note = Se_VK-CK/Q38E/V133K
EIVLTQSPGTLSLSPGERATLSCRASQSVSSSYLAWYQEKPGQAPRLLIYGASSRATGIPDRFSGSGSGTDFTLTISRLEPEDFAVYYCQQYGSSPCTFGQGTKVEIKRTVAAPSVFIFPPSDEQLKSGTASVKCLLNNFYPREAKVQWKVDNALQSGNSQESVTEQDSKDSTYSLSSTLTLSKADYEKHKVYACEVTHQGLSSPVTKSFNRGEC

SEQ ID NO: 4905 - protein, 215 aa, synthetic construct
  REGION 1..215: note = Se_VK-CK/Q38K/V133K
EIVLTQSPGTLSLSPGERATLSCRASQSVSSSYLAWYQKKPGQAPRLLIYGASSRATGIPDRFSGSGSGTDFTLTISRLEPEDFAVYYCQQYGSSPCTFGQGTKVEIKRTVAAPSVFIFPPSDEQLKSGTASVKCLLNNFYPREAKVQWKVDNALQSGNSQESVTEQDSKDSTYSLSSTLTLSKADYEKHKVYACEVTHQGLSSPVTKSFNRGEC

SEQ ID NO: 4906 - protein, 228 aa, synthetic construct
  REGION 1..228: note = Ve_VH-x-CK/Q39K/V133E
QVQLVQSGAEVKKPGASVKVSCKGSGYTFTSYWMHWVRKAPGQRLEWIGEIDPSESNTNYNQKFKGRVTLTVDISASTAYMELSSLRSEDTAVYYCARGGYDGWDYAIDYWGQGTLVTVSSASVAAPSVFIFPPSDEQLKSGTASVECLLNNFYPREAKVQWKVDNALQSGNSQESVTEQDSKDSTYSLSSTLTLSKADYEKHKVYACEVTHQGLSSPVTKSFNRGEC

SEQ ID NO: 4907 - protein, 228 aa, synthetic construct
  REGION 1..228: note = Ve_VH-x-CK/Q39E/V133E
QVQLVQSGAEVKKPGASVKVSCKGSGYTFTSYWMHWVREAPGQRLEWIGEIDPSESNTNYNQKFKGRVTLTVDISASTAYMELSSLRSEDTAVYYCARGGYDGWDYAIDYWGQGTLVTVSSASVAAPSVFIFPPSDEQLKSGTASVECLLNNFYPREAKVQWKVDNALQSGNSQESVTEQDSKDSTYSLSSTLTLSKADYEKHKVYACEVTHQGLSSPVTKSFNRGEC

SEQ ID NO: 4908 - protein, 219 aa, synthetic construct
  REGION 1..219: note = Ve_VK-CK/Q38E/V133K
DVVMTQSPLSLPVTPGEPASISCRSSQSLAKSYGNTYLSWYLEKPGQSPQLLIYGISNRFSGVPDRFSGSGSGTDFTLKISRVEAEDVGVYYCLQGTHQPYTFGQGTKVEIKRTVAAPSVFIFPPSDEQLKSGTASVKCLLNNFYPREAKVQWKVDNALQSGNSQESVTEQDSKDSTYSLSSTLTLSKADYEKHKVYACEVTHQGLSSPVTKSFNRGEC

SEQ ID NO: 4909 - protein, 219 aa, synthetic construct
  REGION 1..219: note = Ve_VK-CK/Q38K/V133K
DVVMTQSPLSLPVTPGEPASISCRSSQSLAKSYGNTYLSWYLKKPGQSPQLLIYGISNRFSGVPDRFSGSGSGTDFTLKISRVEAEDVGVYYCLQGTHQPYTFGQGTKVEIKRTVAAPSVFIFPPSDEQLKSGTASVKCLLNNFYPREAKVQWKVDNALQSGNSQESVTEQDSKDSTYSLSSTLTLSKADYEKHKVYACEVTHQGLSSPVTKSFNRGEC

SEQ ID NO: 4910 - protein, 214 aa, synthetic construct; identical to SEQ ID NO: 238
  REGION 1..214: note = Ad_VK-CK

SEQ ID NO: 4911 - protein, 228 aa, synthetic construct
  REGION 1..228: note = Ad_VH-x-CK/N84S
EVQLVESGGGLVQPGRSLRLSCAASGFTFDDYAMHWVRQAPGKGLEWVSAITWNSGHIDYADSVEGRFTISRDNAKNSLYLQMSSLRAEDTAVYYCAKVSYLSTASSLDYWGQGTLVTVSSRTVAAPSVFIFPPSDEQLKSGTASVVCLLNNFYPREAKVQWKVDNALQSGNSQESVTEQDSKDSTYSLSSTLTLSKADYEKHKVYACEVTHQGLSSPVTKSFNRGEC

SEQ ID NO: 4912 - protein, 214 aa, synthetic construct; identical to SEQ ID NO: 4858
  REGION 1..214: note = Us_VK-CK

SEQ ID NO: 4913 - protein, 226 aa, synthetic construct
  REGION 1..226: note = Us_VH-x-CK/N84S
EVQLVQSGAEVKKPGESLKISCKGSGYSFTTYWLGWVRQMPGKGLDWIGIMSPVDSDIRYSPSFQGQVTMSVDKSITTAYLQWSSLKASDTAMYYCARRRPGQGYFDFWGQGTLVTVSSRTVAAPSVFIFPPSDEQLKSGTASVVCLLNNFYPREAKVQWKVDNALQSGNSQESVTEQDSKDSTYSLSSTLTLSKADYEKHKVYACEVTHQGLSSPVTKSFNRGEC

SEQ ID NO: 4914 - protein, 215 aa, synthetic construct; identical to SEQ ID NO: 4859
  REGION 1..215: note = Se_VK-CK

SEQ ID NO: 4915 - protein, 234 aa, synthetic construct
  REGION 1..234: note = Se_VH-x-CK/N84S
EVQLVESGGGLVQPGGSLRLSCAASGFTFSNYWMNWVRQAPGKGLEWVAAINQDGSEKYYVGSVKGRFTISRDNAKNSLYLQMSSLRVEDTAVYYCVRDYYDILTDYYIHYWYFDLWGRGTLVTVSSRTVAAPSVFIFPPSDEQLKSGTASVVCLLNNFYPREAKVQWKVDNALQSGNSQESVTEQDSKDSTYSLSSTLTLSKADYEKHKVYACEVTHQGLSSPVTKSFNRGEC

SEQ ID NO: 4916 - protein, 219 aa, synthetic construct; identical to SEQ ID NO: 4857
  REGION 1..219: note = Ve_VK-CK

SEQ ID NO: 4917 - protein, 228 aa, synthetic construct
  REGION 1..228: note = Ve_VH-x-CK
QVQLVQSGAEVKKPGASVKVSCKGSGYTFTSYWMHWVRQAPGQRLEWIGEIDPSESNTNYNQKFKGRVTLTVDISASTAYMELSSLRSEDTAVYYCARGGYDGWDYAIDYWGQGTLVTVSSRTVAAPSVFIFPPSDEQLKSGTASVVCLLNNFYPREAKVQWKVDNALQSGNSQESVTEQDSKDSTYSLSSTLTLSKADYEKHKVYACEVTHQGLSSPVTKSFNRGEC

SEQ ID NO: 4918 - protein, 221 aa, synthetic construct; identical to SEQ ID NO: 4828
  REGION 1..221: note = Fc6/knob

SEQ ID NO: 4919 - protein, 221 aa, synthetic construct
  REGION 1..221: note = Fc6/knob/LALA
CPPCPAPEAAGGPSVFLFPPKPKDTLMISRTPEVTCVVVDVSHEDPEVKFNWYVDGVEVHNAKTKPREEQYNSTYRVVSVLTVLHQDWLNGKEYKCKVSNKALPAPIEKTISKAKGQPREPQVYTLPPCRDELTKNQVSLWCLVKGFYPSDIAVEWESNGQPENNYKTTPPVLDSDGSFFLYSKLTVDKSRWQQGNVFSCSVMHEALHNHYTQKSLSLSPG

SEQ ID NO: 4920 - protein, 605 aa, synthetic construct
  REGION 1..605: note = Pe_VH-CH1/Q39K/S183E/CLD201/hole/PGLALA/RF
QVQLVQSGVEVKKPGASVKVSCKASGYTFTNYYMYWVRKAPGQGLEWMGGINPSNGGTNFNEKFKNRVTLTTDSSTTTAYMELKSLQFDDTAVYYCARRDYRFDMGFDYWGQGTTVTVSSASTKGPSVFPLAPSSKSTSGGTAALGCLVKDYFPEPVTVSWNSGALTSGVHTFPAVLQSSGLYSLESVVTVPSSSLGTQTYICNVNHKPSNTKVDKKVEPKSCTDWSPYADQSIKVRISLKSALGDKAYEWNDNEMYLFRSSVAYAMRQYFLKVKNQMILFGEEDVRVANLKPRISFNFFVTAPKNVSDIIPRTEVEKAIRMSRSRINDAFRLNDNSLEFLGIQPTLGPPNQPPVSTSTSPTRSMAPGAVHLPQPVSTRDKTHTCPPCPAPEAAGGPSVFLFPPKPKDTLMISRTPEVTCVVVDVSHEDPEVKFNWYVDGVEVHNAKTKPREEQYNSTYRVVSVLTVLHQDWLNGKEYKCKVSNKALGAPIEKTISKAKGQPREPQVCTLPPSRDELTKNQVSLSCAVKGFYPSDIAVEWESNGQPENNYKTTPPVLDSDGSFFLVSKLTVDKSRWQQGNVFSCSVMHEALHNRFTQKSLSLSPG

SEQ ID NO: 4921 - protein, 439 aa, synthetic construct
  REGION 1..439: note = Ip_VK-x-CH1/Q38E/S183K/knob/PGLALA
EIVLTQSPGTLSLSPGERATLSCRASQSVGSSYLAWYQEKPGQAPRLLIYGAFSRATGIPDRFSGSGSGTDFTLTISRLEPEDFAVYYCQQYGSSPWTFGQGTKVEIKSSASTKGPSVFPLAPSSKSTSGGTAALGCLVKDYFPEPVTVSWNSGALTSGVHTFPAVLQSSGLYSLKSVVTVPSSSLGTQTYICNVNHKPSNTKVDKKVEPKSCDKTHTCPPCPAPEAAGGPSVFLFPPKPKDTLMISRTPEVTCVVVDVSHEDPEVKFNWYVDGVEVHNAKTKPREEQYNSTYRVVSVLTVLHQDWLNGKEYKCKVSNKALGAPIEKTISKAKGQPREPQVYTLPPCRDELTKNQVSLWCLVKGFYPSDIAVEWESNGQPENNYKTTPPVLDSDGSFFLYSKLTVDKSRWQQGNVFSCSVMHEALHNHYTQKSLSLSPG

SEQ ID NO: 4922 - protein, 439 aa, synthetic construct
  REGION 1..439: note = Ip_VK-x-CH1/Q38K/S183K/knob/PGLALA
EIVLTQSPGTLSLSPGERATLSCRASQSVGSSYLAWYQKKPGQAPRLLIYGAFSRATGIPDRFSGSGSGTDFTLTISRLEPEDFAVYYCQQYGSSPWTFGQGTKVEIKSSASTKGPSVFPLAPSSKSTSGGTAALGCLVKDYFPEPVTVSWNSGALTSGVHTFPAVLQSSGLYSLKSVVTVPSSSLGTQTYICNVNHKPSNTKVDKKVEPKSCDKTHTCPPCPAPEAAGGPSVFLFPPKPKDTLMISRTPEVTCVVVDVSHEDPEVKFNWYVDGVEVHNAKTKPREEQYNSTYRVVSVLTVLHQDWLNGKEYKCKVSNKALGAPIEKTISKAKGQPREPQVYTLPPCRDELTKNQVSLWCLVKGFYPSDIAVEWESNGQPENNYKTTPPVLDSDGSFFLYSKLTVDKSRWQQGNVFSCSVMHEALHNHYTQKSLSLSPG

SEQ ID NO: 4923 - protein, 605 aa, synthetic construct
  REGION 1..605: note = Pe_VH-CH1/Q39E/S183E/CLD201/hole/PGLALA/RF
QVQLVQSGVEVKKPGASVKVSCKASGYTFTNYYMYWVREAPGQGLEWMGGINPSNGGTNFNEKFKNRVTLTTDSSTTTAYMELKSLQFDDTAVYYCARRDYRFDMGFDYWGQGTTVTVSSASTKGPSVFPLAPSSKSTSGGTAALGCLVKDYFPEPVTVSWNSGALTSGVHTFPAVLQSSGLYSLESVVTVPSSSLGTQTYICNVNHKPSNTKVDKKVEPKSCTDWSPYADQSIKVRISLKSALGDKAYEWNDNEMYLFRSSVAYAMRQYFLKVKNQMILFGEEDVRVANLKPRISFNFFVTAPKNVSDIIPRTEVEKAIRMSRSRINDAFRLNDNSLEFLGIQPTLGPPNQPPVSTSTSPTRSMAPGAVHLPQPVSTRDKTHTCPPCPAPEAAGGPSVFLFPPKPKDTLMISRTPEVTCVVVDVSHEDPEVKFNWYVDGVEVHNAKTKPREEQYNSTYRVVSVLTVLHQDWLNGKEYKCKVSNKALGAPIEKTISKAKGQPREPQVCTLPPSRDELTKNQVSLSCAVKGFYPSDIAVEWESNGQPENNYKTTPPVLDSDGSFFLVSKLTVDKSRWQQGNVFSCSVMHEALHNRFTQKSLSLSPG

SEQ ID NO: 4924 - protein, 439 aa, synthetic construct
  REGION 1..439: note = Ip_VK-x-CH1/Q38E/S183K/knob/PGLALA/RF
EIVLTQSPGTLSLSPGERATLSCRASQSVGSSYLAWYQEKPGQAPRLLIYGAFSRATGIPDRFSGSGSGTDFTLTISRLEPEDFAVYYCQQYGSSPWTFGQGTKVEIKSSASTKGPSVFPLAPSSKSTSGGTAALGCLVKDYFPEPVTVSWNSGALTSGVHTFPAVLQSSGLYSLKSVVTVPSSSLGTQTYICNVNHKPSNTKVDKKVEPKSCDKTHTCPPCPAPEAAGGPSVFLFPPKPKDTLMISRTPEVTCVVVDVSHEDPEVKFNWYVDGVEVHNAKTKPREEQYNSTYRVVSVLTVLHQDWLNGKEYKCKVSNKALGAPIEKTISKAKGQPREPQVYTLPPCRDELTKNQVSLWCLVKGFYPSDIAVEWESNGQPENNYKTTPPVLDSDGSFFLYSKLTVDKSRWQQGNVFSCSVMHEALHNRFTQKSLSLSPG

SEQ ID NO: 4925 - protein, 439 aa, synthetic construct
  REGION 1..439: note = Ip_VK-x-CH1/Q38K/S183K/knob/PGLALA/RF
EIVLTQSPGTLSLSPGERATLSCRASQSVGSSYLAWYQKKPGQAPRLLIYGAFSRATGIPDRFSGSGSGTDFTLTISRLEPEDFAVYYCQQYGSSPWTFGQGTKVEIKSSASTKGPSVFPLAPSSKSTSGGTAALGCLVKDYFPEPVTVSWNSGALTSGVHTFPAVLQSSGLYSLKSVVTVPSSSLGTQTYICNVNHKPSNTKVDKKVEPKSCDKTHTCPPCPAPEAAGGPSVFLFPPKPKDTLMISRTPEVTCVVVDVSHEDPEVKFNWYVDGVEVHNAKTKPREEQYNSTYRVVSVLTVLHQDWLNGKEYKCKVSNKALGAPIEKTISKAKGQPREPQVYTLPPCRDELTKNQVSLWCLVKGFYPSDIAVEWESNGQPENNYKTTPPVLDSDGSFFLYSKLTVDKSRWQQGNVFSCSVMHEALHNRFTQKSLSLSPG

SEQ ID NO: 4926 - protein, 603 aa, synthetic construct
  REGION 1..603: note = Ip_VH-CH1/N84S/Q39K/S183E/CLD201/hole/PGLALA/RF
QVQLVESGGGVVQPGRSLRLSCAASGFTFSSYTMHWVRKAPGKGLEWVTFISYDGNNKYYADSVKGRFTISRDNSKNTLYLQMSSLRAEDTAIYYCARTGWLGPFDYWGQGTLVTVSSASTKGPSVFPLAPSSKSTSGGTAALGCLVKDYFPEPVTVSWNSGALTSGVHTFPAVLQSSGLYSLESVVTVPSSSLGTQTYICNVNHKPSNTKVDKKVEPKSCTDWSPYADQSIKVRISLKSALGDKAYEWNDNEMYLFRSSVAYAMRQYFLKVKNQMILFGEEDVRVANLKPRISFNFFVTAPKNVSDIIPRTEVEKAIRMSRSRINDAFRLNDNSLEFLGIQPTLGPPNQPPVSTSTSPTRSMAPGAVHLPQPVSTRDKTHTCPPCPAPEAAGGPSVFLFPPKPKDTLMISRTPEVTCVVVDVSHEDPEVKFNWYVDGVEVHNAKTKPREEQYNSTYRVVSVLTVLHQDWLNGKEYKCKVSNKALGAPIEKTISKAKGQPREPQVCTLPPSRDELTKNQVSLSCAVKGFYPSDIAVEWESNGQPENNYKTTPPVLDSDGSFFLVSKLTVDKSRWQQGNVFSCSVMHEALHNRFTQKSLSLSPG

SEQ ID NO: 4927 - protein, 442 aa, synthetic construct
  REGION 1..442: note = Pe_VK-x-CH1/Q38E/S183K/knob/PGLALA
EIVLTQSPATLSLSPGERATLSCRASKGVSTSGYSYLHWYQEKPGQAPRLLIYLASYLESGVPARFSGSGSGTDFTLTISSLEPEDFAVYYCQHSRDLPLTFGGGTKVEIKSSASTKGPSVFPLAPSSKSTSGGTAALGCLVKDYFPEPVTVSWNSGALTSGVHTFPAVLQSSGLYSLKSVVTVPSSSLGTQTYICNVNHKPSNTKVDKKVEPKSCDKTHTCPPCPAPEAAGGPSVFLFPPKPKDTLMISRTPEVTCVVVDVSHEDPEVKFNWYVDGVEVHNAKTKPREEQYNSTYRVVSVLTVLHQDWLNGKEYKCKVSNKALGAPIEKTISKAKGQPREPQVYTLPPCRDELTKNQVSLWCLVKGFYPSDIAVEWESNGQPENNYKTTPPVLDSDGSFFLYSKLTVDKSRWQQGNVFSCSVMHEALHNHYTQKSLSLSPG

SEQ ID NO: 4928 - protein, 442 aa, synthetic construct
  REGION 1..442: note = Pe_VK-x-CH1/Q38K/S183K/knob/PGLALA
EIVLTQSPATLSLSPGERATLSCRASKGVSTSGYSYLHWYQKKPGQAPRLLIYLASYLESGVPARFSGSGSGTDFTLTISSLEPEDFAVYYCQHSRDLPLTFGGGTKVEIKSSASTKGPSVFPLAPSSKSTSGGTAALGCLVKDYFPEPVTVSWNSGALTSGVHTFPAVLQSSGLYSLKSVVTVPSSSLGTQTYICNVNHKPSNTKVDKKVEPKSCDKTHTCPPCPAPEAAGGPSVFLFPPKPKDTLMISRTPEVTCVVVDVSHEDPEVKFNWYVDGVEVHNAKTKPREEQYNSTYRVVSVLTVLHQDWLNGKEYKCKVSNKALGAPIEKTISKAKGQPREPQVYTLPPCRDELTKNQVSLWCLVKGFYPSDIAVEWESNGQPENNYKTTPPVLDSDGSFFLYSKLTVDKSRWQQGNVFSCSVMHEALHNHYTQKSLSLSPG

SEQ ID NO: 4929 - protein, 603 aa, synthetic construct
  REGION 1..603: note = Ip_VH-CH1/N84S/Q39E/S183E/CLD201/hole/PGLALA/RF
QVQLVESGGGVVQPGRSLRLSCAASGFTFSSYTMHWVREAPGKGLEWVTFISYDGNNKYYADSVKGRFTISRDNSKNTLYLQMSSLRAEDTAIYYCARTGWLGPFDYWGQGTLVTVSSASTKGPSVFPLAPSSKSTSGGTAALGCLVKDYFPEPVTVSWNSGALTSGVHTFPAVLQSSGLYSLESVVTVPSSSLGTQTYICNVNHKPSNTKVDKKVEPKSCTDWSPYADQSIKVRISLKSALGDKAYEWNDNEMYLFRSSVAYAMRQYFLKVKNQMILFGEEDVRVANLKPRISFNFFVTAPKNVSDIIPRTEVEKAIRMSRSRINDAFRLNDNSLEFLGIQPTLGPPNQPPVSTSTSPTRSMAPGAVHLPQPVSTRDKTHTCPPCPAPEAAGGPSVFLFPPKPKDTLMISRTPEVTCVVVDVSHEDPEVKFNWYVDGVEVHNAKTKPREEQYNSTYRVVSVLTVLHQDWLNGKEYKCKVSNKALGAPIEKTISKAKGQPREPQVCTLPPSRDELTKNQVSLSCAVKGFYPSDIAVEWESNGQPENNYKTTPPVLDSDGSFFLVSKLTVDKSRWQQGNVFSCSVMHEALHNRFTQKSLSLSPG

SEQ ID NO: 4930 - protein, 605 aa, synthetic construct
  REGION 1..605: note = 388D4-3_VH-CH1/Q39K/S183E/CLD201/hole/PGLALA/RF
EVQLVQSGAEVKKPGASVKVSCKASGYTFTDYEMHWVRKAPGQGLEWMGIIDPGTGGTAYNQKFQGRVTMTADKSTSTVYMELSSLRSEDTAVYYCTSEKFGSNYYFDYWGQGTLVTVSSASTKGPSVFPLAPSSKSTSGGTAALGCLVKDYFPEPVTVSWNSGALTSGVHTFPAVLQSSGLYSLESVVTVPSSSLGTQTYICNVNHKPSNTKVDKKVEPKSCTDWSPYADQSIKVRISLKSALGDKAYEWNDNEMYLFRSSVAYAMRQYFLKVKNQMILFGEEDVRVANLKPRISFNFFVTAPKNVSDIIPRTEVEKAIRMSRSRINDAFRLNDNSLEFLGIQPTLGPPNQPPVSTSTSPTRSMAPGAVHLPQPVSTRDKTHTCPPCPAPEAAGGPSVFLFPPKPKDTLMISRTPEVTCVVVDVSHEDPEVKFNWYVDGVEVHNAKTKPREEQYNSTYRVVSVLTVLHQDWLNGKEYKCKVSNKALGAPIEKTISKAKGQPREPQVCTLPPSRDELTKNQVSLSCAVKGFYPSDIAVEWESNGQPENNYKTTPPVLDSDGSFFLVSKLTVDKSRWQQGNVFSCSVMHEALHNRFTQKSLSLSPG

SEQ ID NO: 4931 - protein, 605 aa, synthetic construct
  REGION 1..605: note = 388D4-3_VH-CH1/Q39E/S183E/CLD201/hole/PGLALA/RF
EVQLVQSGAEVKKPGASVKVSCKASGYTFTDYEMHWVREAPGQGLEWMGIIDPGTGGTAYNQKFQGRVTMTADKSTSTVYMELSSLRSEDTAVYYCTSEKFGSNYYFDYWGQGTLVTVSSASTKGPSVFPLAPSSKSTSGGTAALGCLVKDYFPEPVTVSWNSGALTSGVHTFPAVLQSSGLYSLESVVTVPSSSLGTQTYICNVNHKPSNTKVDKKVEPKSCTDWSPYADQSIKVRISLKSALGDKAYEWNDNEMYLFRSSVAYAMRQYFLKVKNQMILFGEEDVRVANLKPRISFNFFVTAPKNVSDIIPRTEVEKAIRMSRSRINDAFRLNDNSLEFLGIQPTLGPPNQPPVSTSTSPTRSMAPGAVHLPQPVSTRDKTHTCPPCPAPEAAGGPSVFLFPPKPKDTLMISRTPEVTCVVVDVSHEDPEVKFNWYVDGVEVHNAKTKPREEQYNSTYRVVSVLTVLHQDWLNGKEYKCKVSNKALGAPIEKTISKAKGQPREPQVCTLPPSRDELTKNQVSLSCAVKGFYPSDIAVEWESNGQPENNYKTTPPVLDSDGSFFLVSKLTVDKSRWQQGNVFSCSVMHEALHNRFTQKSLSLSPG

SEQ ID NO: 4932 - protein, 443 aa, synthetic construct
  REGION 1..443: note = 388D4-3_VK-x-CH1/Q38E/S183K/knob/PGLALA
DIVMTQTPLSSPVTLGQPASISCRSSQTIVHSDGNTYLEWYQERPGQPPRLLIYKVSNRFSGVPDRFSGSGAGTDFTLKISRVEAEDVGVYYCFQGSHVPLTFGQGTKVEIKSSASTKGPSVFPLAPSSKSTSGGTAALGCLVKDYFPEPVTVSWNSGALTSGVHTFPAVLQSSGLYSLKSVVTVPSSSLGTQTYICNVNHKPSNTKVDKKVEPKSCDKTHTCPPCPAPEAAGGPSVFLFPPKPKDTLMISRTPEVTCVVVDVSHEDPEVKFNWYVDGVEVHNAKTKPREEQYNSTYRVVSVLTVLHQDWLNGKEYKCKVSNKALGAPIEKTISKAKGQPREPQVYTLPPCRDELTKNQVSLWCLVKGFYPSDIAVEWESNGQPENNYKTTPPVLDSDGSFFLYSKLTVDKSRWQQGNVFSCSVMHEALHNHYTQKSLSLSPG

SEQ ID NO: 4933 - protein, 443 aa, synthetic construct
  REGION 1..443: note = 388D4-3_VK-x-CH1/Q38K/S183K/knob/PGLALA
DIVMTQTPLSSPVTLGQPASISCRSSQTIVHSDGNTYLEWYQKRPGQPPRLLIYKVSNRFSGVPDRFSGSGAGTDFTLKISRVEAEDVGVYYCFQGSHVPLTFGQGTKVEIKSSASTKGPSVFPLAPSSKSTSGGTAALGCLVKDYFPEPVTVSWNSGALTSGVHTFPAVLQSSGLYSLKSVVTVPSSSLGTQTYICNVNHKPSNTKVDKKVEPKSCDKTHTCPPCPAPEAAGGPSVFLFPPKPKDTLMISRTPEVTCVVVDVSHEDPEVKFNWYVDGVEVHNAKTKPREEQYNSTYRVVSVLTVLHQDWLNGKEYKCKVSNKALGAPIEKTISKAKGQPREPQVYTLPPCRDELTKNQVSLWCLVKGFYPSDIAVEWESNGQPENNYKTTPPVLDSDGSFFLYSKLTVDKSRWQQGNVFSCSVMHEALHNHYTQKSLSLSPG

SEQ ID NO: 4934 - protein, 439 aa, synthetic construct
  REGION 1..439: note = 244C8-2_VK-x-CH1/Q38E/S183K/knob/PGLALA
DIVLTQSPGTLSLSPGEKVTLSCRASSSVSSNYLYWYQEKPGQAPRLVIYSTSNLATGIPDRFSGSGSGTDYTLTISRLEPEDFAVYFCHQWSSYPPTFGQGTKVEIKSSASTKGPSVFPLAPSSKSTSGGTAALGCLVKDYFPEPVTVSWNSGALTSGVHTFPAVLQSSGLYSLKSVVTVPSSSLGTQTYICNVNHKPSNTKVDKKVEPKSCDKTHTCPPCPAPEAAGGPSVFLFPPKPKDTLMISRTPEVTCVVVDVSHEDPEVKFNWYVDGVEVHNAKTKPREEQYNSTYRVVSVLTVLHQDWLNGKEYKCKVSNKALGAPIEKTISKAKGQPREPQVYTLPPCRDELTKNQVSLWCLVKGFYPSDIAVEWESNGQPENNYKTTPPVLDSDGSFFLYSKLTVDKSRWQQGNVFSCSVMHEALHNHYTQKSLSLSPG

SEQ ID NO: 4935 - protein, 439 aa, synthetic construct
  REGION 1..439: note = 244C8-2_VK-x-CH1/Q38K/S183K/knob/PGLALA
DIVLTQSPGTLSLSPGEKVTLSCRASSSVSSNYLYWYQKKPGQAPRLVIYSTSNLATGIPDRFSGSGSGTDYTLTISRLEPEDFAVYFCHQWSSYPPTFGQGTKVEIKSSASTKGPSVFPLAPSSKSTSGGTAALGCLVKDYFPEPVTVSWNSGALTSGVHTFPAVLQSSGLYSLKSVVTVPSSSLGTQTYICNVNHKPSNTKVDKKVEPKSCDKTHTCPPCPAPEAAGGPSVFLFPPKPKDTLMISRTPEVTCVVVDVSHEDPEVKFNWYVDGVEVHNAKTKPREEQYNSTYRVVSVLTVLHQDWLNGKEYKCKVSNKALGAPIEKTISKAKGQPREPQVYTLPPCRDELTKNQVSLWCLVKGFYPSDIAVEWESNGQPENNYKTTPPVLDSDGSFFLYSKLTVDKSRWQQGNVFSCSVMHEALHNHYTQKSLSLSPG

SEQ ID NO: 4936 - protein, 605 aa, synthetic construct
  REGION 1..605: note = 244C8-2_VH-CH1/Q39K/S183E/CLD201/hole/PGLALA/RF
QVQLVQSGAEVKKPGASVKVSCKASGYTFTSYWMHWVRKAPGQGLEWMGMIDPSNSETSLNQKFQGRVTMTVDKSTNTVYMELSSLRSEDTAVYYCARSRGNYAYEMDYWGQGTLVTVSSASTKGPSVFPLAPSSKSTSGGTAALGCLVKDYFPEPVTVSWNSGALTSGVHTFPAVLQSSGLYSLESVVTVPSSSLGTQTYICNVNHKPSNTKVDKKVEPKSCTDWSPYADQSIKVRISLKSALGDKAYEWNDNEMYLFRSSVAYAMRQYFLKVKNQMILFGEEDVRVANLKPRISFNFFVTAPKNVSDIIPRTEVEKAIRMSRSRINDAFRLNDNSLEFLGIQPTLGPPNQPPVSTSTSPTRSMAPGAVHLPQPVSTRDKTHTCPPCPAPEAAGGPSVFLFPPKPKDTLMISRTPEVTCVVVDVSHEDPEVKFNWYVDGVEVHNAKTKPREEQYNSTYRVVSVLTVLHQDWLNGKEYKCKVSNKALGAPIEKTISKAKGQPREPQVCTLPPSRDELTKNQVSLSCAVKGFYPSDIAVEWESNGQPENNYKTTPPVLDSDGSFFLVSKLTVDKSRWQQGNVFSCSVMHEALHNRFTQKSLSLSPG

SEQ ID NO: 4937 - protein, 605 aa, synthetic construct
  REGION 1..605: note = 244C8-2_VH-CH1/Q39E/S183E/CLD201/hole/PGLALA/RF
QVQLVQSGAEVKKPGASVKVSCKASGYTFTSYWMHWVREAPGQGLEWMGMIDPSNSETSLNQKFQGRVTMTVDKSTNTVYMELSSLRSEDTAVYYCARSRGNYAYEMDYWGQGTLVTVSSASTKGPSVFPLAPSSKSTSGGTAALGCLVKDYFPEPVTVSWNSGALTSGVHTFPAVLQSSGLYSLESVVTVPSSSLGTQTYICNVNHKPSNTKVDKKVEPKSCTDWSPYADQSIKVRISLKSALGDKAYEWNDNEMYLFRSSVAYAMRQYFLKVKNQMILFGEEDVRVANLKPRISFNFFVTAPKNVSDIIPRTEVEKAIRMSRSRINDAFRLNDNSLEFLGIQPTLGPPNQPPVSTSTSPTRSMAPGAVHLPQPVSTRDKTHTCPPCPAPEAAGGPSVFLFPPKPKDTLMISRTPEVTCVVVDVSHEDPEVKFNWYVDGVEVHNAKTKPREEQYNSTYRVVSVLTVLHQDWLNGKEYKCKVSNKALGAPIEKTISKAKGQPREPQVCTLPPSRDELTKNQVSLSCAVKGFYPSDIAVEWESNGQPENNYKTTPPVLDSDGSFFLVSKLTVDKSRWQQGNVFSCSVMHEALHNRFTQKSLSLSPG

SEQ ID NO: 4938 - protein, 218 aa, synthetic construct
  REGION 1..218: note = Pe_VK-CK/Q38E/V133K
EIVLTQSPATLSLSPGERATLSCRASKGVSTSGYSYLHWYQEKPGQAPRLLIYLASYLESGVPARFSGSGSGTDFTLTISSLEPEDFAVYYCQHSRDLPLTFGGGTKVEIKRTVAAPSVFIFPPSDEQLKSGTASVKCLLNNFYPREAKVQWKVDNALQSGNSQESVTEQDSKDSTYSLSSTLTLSKADYEKHKVYACEVTHQGLSSPVTKSFNRGEC

SEQ ID NO: 4939 - protein, 225 aa, synthetic construct
  REGION 1..225: note = Ip_VH-x-CK/N84S/Q39K/V133E
QVQLVESGGGVVQPGRSLRLSCAASGFTFSSYTMHWVRKAPGKGLEWVTFISYDGNNKYYADSVKGRFTISRDNSKNTLYLQMSSLRAEDTAIYYCARTGWLGPFDYWGQGTLVTVSSASVAAPSVFIFPPSDEQLKSGTASVECLLNNFYPREAKVQWKVDNALQSGNSQESVTEQDSKDSTYSLSSTLTLSKADYEKHKVYACEVTHQGLSSPVTKSFNRGEC

SEQ ID NO: 4940 - protein, 225 aa, synthetic construct
  REGION 1..225: note = Ip_VH-x-CK/N84S/Q39E/V133E
QVQLVESGGGVVQPGRSLRLSCAASGFTFSSYTMHWVREAPGKGLEWVTFISYDGNNKYYADSVKGRFTISRDNSKNTLYLQMSSLRAEDTAIYYCARTGWLGPFDYWGQGTLVTVSSASVAAPSVFIFPPSDEQLKSGTASVECLLNNFYPREAKVQWKVDNALQSGNSQESVTEQDSKDSTYSLSSTLTLSKADYEKHKVYACEVTHQGLSSPVTKSFNRGEC

SEQ ID NO: 4941 - protein, 218 aa, synthetic construct
  REGION 1..218: note = Pe_VK-CK/Q38K/V133K
EIVLTQSPATLSLSPGERATLSCRASKGVSTSGYSYLHWYQKKPGQAPRLLIYLASYLESGVPARFSGSGSGTDFTLTISSLEPEDFAVYYCQHSRDLPLTFGGGTKVEIKRTVAAPSVFIFPPSDEQLKSGTASVKCLLNNFYPREAKVQWKVDNALQSGNSQESVTEQDSKDSTYSLSSTLTLSKADYEKHKVYACEVTHQGLSSPVTKSFNRGEC

SEQ ID NO: 4942 - protein, 215 aa, synthetic construct
  REGION 1..215: note = Ip_VK-CK/Q38E/V133K
EIVLTQSPGTLSLSPGERATLSCRASQSVGSSYLAWYQEKPGQAPRLLIYGAFSRATGIPDRFSGSGSGTDFTLTISRLEPEDFAVYYCQQYGSSPWTFGQGTKVEIKRTVAAPSVFIFPPSDEQLKSGTASVKCLLNNFYPREAKVQWKVDNALQSGNSQESVTEQDSKDSTYSLSSTLTLSKADYEKHKVYACEVTHQGLSSPVTKSFNRGEC

SEQ ID NO: 4943 - protein, 227 aa, synthetic construct
  REGION 1..227: note = Pe_VH-x-CK/Q39K/V133E
QVQLVQSGVEVKKPGASVKVSCKASGYTFTNYYMYWVRKAPGQGLEWMGGINPSNGGTNFNEKFKNRVTLTTDSSTTTAYMELKSLQFDDTAVYYCARRDYRFDMGFDYWGQGTLVTVSSASVAAPSVFIFPPSDEQLKSGTASVECLLNNFYPREAKVQWKVDNALQSGNSQESVTEQDSKDSTYSLSSTLTLSKADYEKHKVYACEVTHQGLSSPVTKSFNRGEC

SEQ ID NO: 4944 - protein, 227 aa, synthetic construct
  REGION 1..227: note = Pe_VH-x-CK/Q39E/V133E
QVQLVQSGVEVKKPGASVKVSCKASGYTFTNYYMYWVREAPGQGLEWMGGINPSNGGTNFNEKFKNRVTLTTDSSTTTAYMELKSLQFDDTAVYYCARRDYRFDMGFDYWGQGTLVTVSSASVAAPSVFIFPPSDEQLKSGTASVECLLNNFYPREAKVQWKVDNALQSGNSQESVTEQDSKDSTYSLSSTLTLSKADYEKHKVYACEVTHQGLSSPVTKSFNRGEC

SEQ ID NO: 4945 - protein, 215 aa, synthetic construct
  REGION 1..215: note = Ip_VK-CK/Q38K/V133K
EIVLTQSPGTLSLSPGERATLSCRASQSVGSSYLAWYQKKPGQAPRLLIYGAFSRATGIPDRFSGSGSGTDFTLTISRLEPEDFAVYYCQQYGSSPWTFGQGTKVEIKRTVAAPSVFIFPPSDEQLKSGTASVKCLLNNFYPREAKVQWKVDNALQSGNSQESVTEQDSKDSTYSLSSTLTLSKADYEKHKVYACEVTHQGLSSPVTKSFNRGEC

SEQ ID NO: 4946 - protein, 219 aa, synthetic construct
  REGION 1..219: note = 388D4-3_VK-CK/Q38E/V133K
DIVMTQTPLSSPVTLGQPASISCRSSQTIVHSDGNTYLEWYQERPGQPPRLLIYKVSNRFSGVPDRFSGSGAGTDFTLKISRVEAEDVGVYYCFQGSHVPLTFGQGTKLEIKRTVAAPSVFIFPPSDEQLKSGTASVKCLLNNFYPREAKVQWKVDNALQSGNSQESVTEQDSKDSTYSLSSTLTLSKADYEKHKVYACEVTHQGLSSPVTKSFNRGEC

SEQ ID NO: 4947 - protein, 219 aa, synthetic construct
  REGION 1..219: note = 388D4-3_VK-CK/Q38K/V133K
DIVMTQTPLSSPVTLGQPASISCRSSQTIVHSDGNTYLEWYQKRPGQPPRLLIYKVSNRFSGVPDRFSGSGAGTDFTLKISRVEAEDVGVYYCFQGSHVPLTFGQGTKLEIKRTVAAPSVFIFPPSDEQLKSGTASVKCLLNNFYPREAKVQWKVDNALQSGNSQESVTEQDSKDSTYSLSSTLTLSKADYEKHKVYACEVTHQGLSSPVTKSFNRGEC

SEQ ID NO: 4948 - protein, 227 aa, synthetic construct
  REGION 1..227: note = 388D4-3_VH-x-CK/Q39K/V133E
EVQLVQSGAEVKKPGASVKVSCKASGYTFTDYEMHWVRKAPGQGLEWMGIIDPGTGGTAYNQKFQGRVTMTADKSTSTVYMELSSLRSEDTAVYYCTSEKFGSNYYFDYWGQGTLVTVSSASVAAPSVFIFPPSDEQLKSGTASVECLLNNFYPREAKVQWKVDNALQSGNSQESVTEQDSKDSTYSLSSTLTLSKADYEKHKVYACEVTHQGLSSPVTKSFNRGEC

SEQ ID NO: 4949 - protein, 227 aa, synthetic construct
  REGION 1..227: note = 388D4-3_VH-x-CK/Q39E/V133E
EVQLVQSGAEVKKPGASVKVSCKASGYTFTDYEMHWVREAPGQGLEWMGIIDPGTGGTAYNQKFQGRVTMTADKSTSTVYMELSSLRSEDTAVYYCTSEKFGSNYYFDYWGQGTLVTVSSASVAAPSVFIFPPSDEQLKSGTASVECLLNNFYPREAKVQWKVDNALQSGNSQESVTEQDSKDSTYSLSSTLTLSKADYEKHKVYACEVTHQGLSSPVTKSFNRGEC

SEQ ID NO: 4950 - protein, 227 aa, synthetic construct
  REGION 1..227: note = 244C8-2_VH-x-CK/Q39K/V133E
QVQLVQSGAEVKKPGASVKVSCKASGYTFTSYWMHWVRKAPGQGLEWMGMIDPSNSETSLNQKFQGRVTMTVDKSTNTVYMELSSLRSEDTAVYYCARSRGNYAYEMDYWGQGTLVTVSSASVAAPSVFIFPPSDEQLKSGTASVECLLNNFYPREAKVQWKVDNALQSGNSQESVTEQDSKDSTYSLSSTLTLSKADYEKHKVYACEVTHQGLSSPVTKSFNRGEC

SEQ ID NO: 4951 - protein, 227 aa, synthetic construct
  REGION 1..227: note = 244C8-2_VH-x-CK/Q39E/V133E
QVQLVQSGAEVKKPGASVKVSCKASGYTFTSYWMHWVREAPGQGLEWMGMIDPSNSETSLNQKFQGRVTMTVDKSTNTVYMELSSLRSEDTAVYYCARSRGNYAYEMDYWGQGTLVTVSSASVAAPSVFIFPPSDEQLKSGTASVECLLNNFYPREAKVQWKVDNALQSGNSQESVTEQDSKDSTYSLSSTLTLSKADYEKHKVYACEVTHQGLSSPVTKSFNRGEC

SEQ ID NO: 4952 - protein, 215 aa, synthetic construct
  REGION 1..215: note = 244C8-2_VK-CK/Q38E/V133K
DIVLTQSPGTLSLSPGEKVTLSCRASSSVSSNYLYWYQEKPGQAPRLVIYSTSNLATGIPDRFSGSGSGTDYTLTISRLEPEDFAVYFCHQWSSYPPTFGQGTKVEIKRTVAAPSVFIFPPSDEQLKSGTASVKCLLNNFYPREAKVQWKVDNALQSGNSQESVTEQDSKDSTYSLSSTLTLSKADYEKHKVYACEVTHQGLSSPVTKSFNRGEC

SEQ ID NO: 4953 - protein, 215 aa, synthetic construct
  REGION 1..215: note = 244C8-2_VK-CK/Q38K/V133K
DIVLTQSPGTLSLSPGEKVTLSCRASSSVSSNYLYWYQKKPGQAPRLVIYSTSNLATGIPDRFSGSGSGTDYTLTISRLEPEDFAVYFCHQWSSYPPTFGQGTKVEIKRTVAAPSVFIFPPSDEQLKSGTASVKCLLNNFYPREAKVQWKVDNALQSGNSQESVTEQDSKDSTYSLSSTLTLSKADYEKHKVYACEVTHQGLSSPVTKSFNRGEC

SEQ ID NO: 4954 - protein, 221 aa, synthetic construct; identical to SEQ ID NO: 706
  REGION 1..221: note = Fc6/knob/PGLALA

SEQ ID NO: 4955 - protein, 605 aa, synthetic construct; identical to SEQ ID NO: 4920
  REGION 1..605: note = Pe_VH-CH1/Q39K/S183E/CLD201/hole/PGLALA

SEQ ID NO: 4956 - protein, 438 aa, synthetic construct
  REGION 1..438: note = At_VK-x-CH1/Q38E/S183K/knob/PGLALA
DIQMTQSPSSLSASVGDRVTITCRASQDVSTAVAWYQEKPGKAPKLLIYSASFLYSGVPSRFSGSGSGTDFTLTISSLQPEDFATYYCQQYLYHPATFGQGTKVEIKSSASTKGPSVFPLAPSSKSTSGGTAALGCLVKDYFPEPVTVSWNSGALTSGVHTFPAVLQSSGLYSLKSVVTVPSSSLGTQTYICNVNHKPSNTKVDKKVEPKSCDKTHTCPPCPAPEAAGGPSVFLFPPKPKDTLMISRTPEVTCVVVDVSHEDPEVKFNWYVDGVEVHNAKTKPREEQYNSTYRVVSVLTVLHQDWLNGKEYKCKVSNKALGAPIEKTISKAKGQPREPQVYTLPPCRDELTKNQVSLWCLVKGFYPSDIAVEWESNGQPENNYKTTPPVLDSDGSFFLYSKLTVDKSRWQQGNVFSCSVMHEALHNHYTQKSLSLSPG

SEQ ID NO: 4957 - protein, 438 aa, synthetic construct
  REGION 1..438: note = At_VK-x-CH1/Q38K/S183K/knob/PGLALA
DIQMTQSPSSLSASVGDRVTITCRASQDVSTAVAWYQKKPGKAPKLLIYSASFLYSGVPSRFSGSGSGTDFTLTISSLQPEDFATYYCQQYLYHPATFGQGTKVEIKSSASTKGPSVFPLAPSSKSTSGGTAALGCLVKDYFPEPVTVSWNSGALTSGVHTFPAVLQSSGLYSLKSVVTVPSSSLGTQTYICNVNHKPSNTKVDKKVEPKSCDKTHTCPPCPAPEAAGGPSVFLFPPKPKDTLMISRTPEVTCVVVDVSHEDPEVKFNWYVDGVEVHNAKTKPREEQYNSTYRVVSVLTVLHQDWLNGKEYKCKVSNKALGAPIEKTISKAKGQPREPQVYTLPPCRDELTKNQVSLWCLVKGFYPSDIAVEWESNGQPENNYKTTPPVLDSDGSFFLYSKLTVDKSRWQQGNVFSCSVMHEALHNHYTQKSLSLSPG

SEQ ID NO: 4958 - protein, 605 aa, synthetic construct; identical to SEQ ID NO: 4923
  REGION 1..605: note = Pe_VH-CH1/Q39E/S183E/CLD201/hole/PGLALA/RF

SEQ ID NO: 4959 - protein, 603 aa, synthetic construct
  REGION 1..603: note = At_VH-CH1/N84S/Q39K/S183E/CLD201/hole/PGLALA/RF
EVQLVESGGGLVQPGGSLRLSCAASGFTFSDSWIHWVRKAPGKGLEWVAWISPYGGSTYYADSVKGRFTISADTSKNTAYLQMSSLRAEDTAVYYCARRHWPGGFDYWGQGTLVTVSSASTKGPSVFPLAPSSKSTSGGTAALGCLVKDYFPEPVTVSWNSGALTSGVHTFPAVLQSSGLYSLESVVTVPSSSLGTQTYICNVNHKPSNTKVDKKVEPKSCTDWSPYADQSIKVRISLKSALGDKAYEWNDNEMYLFRSSVAYAMRQYFLKVKNQMILFGEEDVRVANLKPRISFNFFVTAPKNVSDIIPRTEVEKAIRMSRSRINDAFRLNDNSLEFLGIQPTLGPPNQPPVSTSTSPTRSMAPGAVHLPQPVSTRDKTHTCPPCPAPEAAGGPSVFLFPPKPKDTLMISRTPEVTCVVVDVSHEDPEVKFNWYVDGVEVHNAKTKPREEQYNSTYRVVSVLTVLHQDWLNGKEYKCKVSNKALGAPIEKTISKAKGQPREPQVCTLPPSRDELTKNQVSLSCAVKGFYPSDIAVEWESNGQPENNYKTTPPVLDSDGSFFLVSKLTVDKSRWQQGNVFSCSVMHEALHNRFTQKSLSLSPG

SEQ ID NO: 4960 - protein, 442 aa, synthetic construct; identical to SEQ ID NO: 4927
  REGION 1..442: note = Pe_VK-x-CH1/Q38E/S183K/knob/PGLALA

SEQ ID NO: 4961 - protein, 442 aa, synthetic construct; identical to SEQ ID NO: 4928
  REGION 1..442: note = Pe_VK-x-CH1/Q38K/S183K/knob/PGLALA

SEQ ID NO: 4962 - protein, 603 aa, synthetic construct
  REGION 1..603: note = At_VH-CH1/N84S/Q39E/S183E/CLD201/hole/PGLALA/RF
EVQLVESGGGLVQPGGSLRLSCAASGFTFSDSWIHWVREAPGKGLEWVAWISPYGGSTYYADSVKGRFTISADTSKNTAYLQMSSLRAEDTAVYYCARRHWPGGFDYWGQGTLVTVSSASTKGPSVFPLAPSSKSTSGGTAALGCLVKDYFPEPVTVSWNSGALTSGVHTFPAVLQSSGLYSLESVVTVPSSSLGTQTYICNVNHKPSNTKVDKKVEPKSCTDWSPYADQSIKVRISLKSALGDKAYEWNDNEMYLFRSSVAYAMRQYFLKVKNQMILFGEEDVRVANLKPRISFNFFVTAPKNVSDIIPRTEVEKAIRMSRSRINDAFRLNDNSLEFLGIQPTLGPPNQPPVSTSTSPTRSMAPGAVHLPQPVSTRDKTHTCPPCPAPEAAGGPSVFLFPPKPKDTLMISRTPEVTCVVVDVSHEDPEVKFNWYVDGVEVHNAKTKPREEQYNSTYRVVSVLTVLHQDWLNGKEYKCKVSNKALGAPIEKTISKAKGQPREPQVCTLPPSRDELTKNQVSLSCAVKGFYPSDIAVEWESNGQPENNYKTTPPVLDSDGSFFLVSKLTVDKSRWQQGNVFSCSVMHEALHNRFTQKSLSLSPG

SEQ ID NO: 4963 - protein, 605 aa, synthetic construct; identical to SEQ ID NO: 4930
  REGION 1..605: note = 388D4-3_VH-CH1/Q39K/S183E/CLD201/hole/PGLALA/RF

SEQ ID NO: 4964 - protein, 605 aa, synthetic construct; identical to SEQ ID NO: 4931
  REGION 1..605: note = 388D4-3_VH-CH1/Q39E/S183E/CLD201/hole/PGLALA/RF

SEQ ID NO: 4965 - protein, 443 aa, synthetic construct; identical to SEQ ID NO: 4932
  REGION 1..443: note = 388D4-3_VK-x-CH1/Q38E/S183K/knob/PGLALA

SEQ ID NO: 4966 - protein, 443 aa, synthetic construct; identical to SEQ ID NO: 4933
  REGION 1..443: note = 388D4-3_VK-x-CH1/Q38K/S183K/knob/PGLALA

SEQ ID NO: 4967 - protein, 438 aa, synthetic construct
  REGION 1..438: note = B60-55_VK-x-CH1/Q38E/S183K/knob/PGLALA
EIVMTQSPATLSLSPGERATLSCRASQSVGIHLAWYQEKLGQAPRLLIYGASSRATGIPDRFSGSGSGTDFTLTISRLEPEDFAVYYCQQYGSLPRTFGQGTKVEIKSSASTKGPSVFPLAPSSKSTSGGTAALGCLVKDYFPEPVTVSWNSGALTSGVHTFPAVLQSSGLYSLKSVVTVPSSSLGTQTYICNVNHKPSNTKVDKKVEPKSCDKTHTCPPCPAPEAAGGPSVFLFPPKPKDTLMISRTPEVTCVVVDVSHEDPEVKFNWYVDGVEVHNAKTKPREEQYNSTYRVVSVLTVLHQDWLNGKEYKCKVSNKALGAPIEKTISKAKGQPREPQVYTLPPCRDELTKNQVSLWCLVKGFYPSDIAVEWESNGQPENNYKTTPPVLDSDGSFFLYSKLTVDKSRWQQGNVFSCSVMHEALHNHYTQKSLSLSPG

SEQ ID NO: 4968 - protein, 438 aa, synthetic construct
  REGION 1..438: note = B60-55_VK-x-CH1/Q38K/S183K/knob/PGLALA
EIVMTQSPATLSLSPGERATLSCRASQSVGIHLAWYQKKLGQAPRLLIYGASSRATGIPDRFSGSGSGTDFTLTISRLEPEDFAVYYCQQYGSLPRTFGQGTKVEIKSSASTKGPSVFPLAPSSKSTSGGTAALGCLVKDYFPEPVTVSWNSGALTSGVHTFPAVLQSSGLYSLKSVVTVPSSSLGTQTYICNVNHKPSNTKVDKKVEPKSCDKTHTCPPCPAPEAAGGPSVFLFPPKPKDTLMISRTPEVTCVVVDVSHEDPEVKFNWYVDGVEVHNAKTKPREEQYNSTYRVVSVLTVLHQDWLNGKEYKCKVSNKALGAPIEKTISKAKGQPREPQVYTLPPCRDELTKNQVSLWCLVKGFYPSDIAVEWESNGQPENNYKTTPPVLDSDGSFFLYSKLTVDKSRWQQGNVFSCSVMHEALHNHYTQKSLSLSPG

SEQ ID NO: 4969 - protein, 605 aa, synthetic construct
  REGION 1..605: note = B60-55_VH-CH1/Q39K/S183E/CLD201/hole/PGLALA/RF
QVQLVQSGAEVKKPASSVKVSCTASGGSFSTYAISWVRKAPGQGLEWMGGIIPIFGTTKYAQRFQGRVTITADESTTTAYMELSSLISDDTALYYCTTSRGFNYGWFDYWGQGTLVTVSSASTKGPSVFPLAPSSKSTSGGTAALGCLVKDYFPEPVTVSWNSGALTSGVHTFPAVLQSSGLYSLESVVTVPSSSLGTQTYICNVNHKPSNTKVDKKVEPKSCTDWSPYADQSIKVRISLKSALGDKAYEWNDNEMYLFRSSVAYAMRQYFLKVKNQMILFGEEDVRVANLKPRISFNFFVTAPKNVSDIIPRTEVEKAIRMSRSRINDAFRLNDNSLEFLGIQPTLGPPNQPPVSTSTSPTRSMAPGAVHLPQPVSTRDKTHTCPPCPAPEAAGGPSVFLFPPKPKDTLMISRTPEVTCVVVDVSHEDPEVKFNWYVDGVEVHNAKTKPREEQYNSTYRVVSVLTVLHQDWLNGKEYKCKVSNKALGAPIEKTISKAKGQPREPQVCTLPPSRDELTKNQVSLSCAVKGFYPSDIAVEWESNGQPENNYKTTPPVLDSDGSFFLVSKLTVDKSRWQQGNVFSCSVMHEALHNRFTQKSLSLSPG

SEQ ID NO: 4970 - protein, 605 aa, synthetic construct
  REGION 1..605: note = B60-55_VH-CH1/Q39E/S183E/CLD201/hole/PGLALA/RF
QVQLVQSGAEVKKPASSVKVSCTASGGSFSTYAISWVREAPGQGLEWMGGIIPIFGTTKYAQRFQGRVTITADESTTTAYMELSSLISDDTALYYCTTSRGFNYGWFDYWGQGTLVTVSSASTKGPSVFPLAPSSKSTSGGTAALGCLVKDYFPEPVTVSWNSGALTSGVHTFPAVLQSSGLYSLESVVTVPSSSLGTQTYICNVNHKPSNTKVDKKVEPKSCTDWSPYADQSIKVRISLKSALGDKAYEWNDNEMYLFRSSVAYAMRQYFLKVKNQMILFGEEDVRVANLKPRISFNFFVTAPKNVSDIIPRTEVEKAIRMSRSRINDAFRLNDNSLEFLGIQPTLGPPNQPPVSTSTSPTRSMAPGAVHLPQPVSTRDKTHTCPPCPAPEAAGGPSVFLFPPKPKDTLMISRTPEVTCVVVDVSHEDPEVKFNWYVDGVEVHNAKTKPREEQYNSTYRVVSVLTVLHQDWLNGKEYKCKVSNKALGAPIEKTISKAKGQPREPQVCTLPPSRDELTKNQVSLSCAVKGFYPSDIAVEWESNGQPENNYKTTPPVLDSDGSFFLVSKLTVDKSRWQQGNVFSCSVMHEALHNRFTQKSLSLSPG

SEQ ID NO: 4971 - protein, 218 aa, synthetic construct; identical to SEQ ID NO: 4938
  REGION 1..218: note = Pe_VK-CK/Q38E/V133K

SEQ ID NO: 4972 - protein, 225 aa, synthetic construct
  REGION 1..225: note = At_VH-x-CK/N84S/Q39K/V133E
EVQLVESGGGLVQPGGSLRLSCAASGFTFSDSWIHWVRKAPGKGLEWVAWISPYGGSTYYADSVKGRFTISADTSKNTAYLQMSSLRAEDTAVYYCARRHWPGGFDYWGQGTLVTVSSASVAAPSVFIFPPSDEQLKSGTASVECLLNNFYPREAKVQWKVDNALQSGNSQESVTEQDSKDSTYSLSSTLTLSKADYEKHKVYACEVTHQGLSSPVTKSFNRGEC

SEQ ID NO: 4973 - protein, 225 aa, synthetic construct
  REGION 1..225: note = At_VH-x-CK/N84S/Q39E/V133E
EVQLVESGGGLVQPGGSLRLSCAASGFTFSDSWIHWVREAPGKGLEWVAWISPYGGSTYYADSVKGRFTISADTSKNTAYLQMSSLRAEDTAVYYCARRHWPGGFDYWGQGTLVTVSSASVAAPSVFIFPPSDEQLKSGTASVECLLNNFYPREAKVQWKVDNALQSGNSQESVTEQDSKDSTYSLSSTLTLSKADYEKHKVYACEVTHQGLSSPVTKSFNRGEC

SEQ ID NO: 4974 - protein, 218 aa, synthetic construct; identical to SEQ ID NO: 4941
  REGION 1..218: note = Pe_VK-CK/Q38K/V133K

SEQ ID NO: 4975 - protein, 214 aa, synthetic construct
  REGION 1..214: note = At_VK-CK/Q38E/V133K
DIQMTQSPSSLSASVGDRVTITCRASQDVSTAVAWYQEKPGKAPKLLIYSASFLYSGVPSRFSGSGSGTDFTLTISSLQPEDFATYYCQQYLYHPATFGQGTKVEIKRTVAAPSVFIFPPSDEQLKSGTASVKCLLNNFYPREAKVQWKVDNALQSGNSQESVTEQDSKDSTYSLSSTLTLSKADYEKHKVYACEVTHQGLSSPVTKSFNRGEC

SEQ ID NO: 4976 - protein, 227 aa, synthetic construct; identical to SEQ ID NO: 4943
  REGION 1..227: note = Pe_VH-x-CK/Q39K/V133E

SEQ ID NO: 4977 - protein, 227 aa, synthetic construct; identical to SEQ ID NO: 4944
  REGION 1..227: note = Pe_VH-x-CK/Q39E/V133E

SEQ ID NO: 4978 - protein, 214 aa, synthetic construct
  REGION 1..214: note = At_VK-CK/Q38K/V133K
DIQMTQSPSSLSASVGDRVTITCRASQDVSTAVAWYQKKPGKAPKLLIYSASFLYSGVPSRFSGSGSGTDFTLTISSLQPEDFATYYCQQYLYHPATFGQGTKVEIKRTVAAPSVFIFPPSDEQLKSGTASVKCLLNNFYPREAKVQWKVDNALQSGNSQESVTEQDSKDSTYSLSSTLTLSKADYEKHKVYACEVTHQGLSSPVTKSFNRGEC

SEQ ID NO: 4979 - protein, 219 aa, synthetic construct; identical to SEQ ID NO: 4946
  REGION 1..219: note = 388D4-3_VK-CK/Q38E/V133K

SEQ ID NO: 4980 - protein, 219 aa, synthetic construct; identical to SEQ ID NO: 4947
  REGION 1..219: note = 388D4-3_VK-CK/Q38K/V133K

SEQ ID NO: 4981 - protein, 227 aa, synthetic construct; identical to SEQ ID NO: 4948
  REGION 1..227: note = 388D4-3_VH-x-CK/Q39K/V133E

SEQ ID NO: 4982 - protein, 227 aa, synthetic construct; identical to SEQ ID NO: 4949
  REGION 1..227: note = 388D4-3_VH-x-CK/Q39E/V133E

SEQ ID NO: 4983 - protein, 227 aa, synthetic construct
  REGION 1..227: note = B60-55_VH-x-CK/Q39K/V133E
QVQLVQSGAEVKKPASSVKVSCTASGGSFSTYAISWVRKAPGQGLEWMGGIIPIFGTTKYAQRFQGRVTITADESTTTAYMELSSLISDDTALYYCTTSRGFNYGWFDYWGQGTLVTVSSASVAAPSVFIFPPSDEQLKSGTASVECLLNNFYPREAKVQWKVDNALQSGNSQESVTEQDSKDSTYSLSSTLTLSKADYEKHKVYACEVTHQGLSSPVTKSFNRGEC

SEQ ID NO: 4984 - protein, 227 aa, synthetic construct
  REGION 1..227: note = B60-55_VH-x-CK/Q39E/V133E
QVQLVQSGAEVKKPASSVKVSCTASGGSFSTYAISWVREAPGQGLEWMGGIIPIFGTTKYAQRFQGRVTITADESTTTAYMELSSLISDDTALYYCTTSRGFNYGWFDYWGQGTLVTVSSASVAAPSVFIFPPSDEQLKSGTASVECLLNNFYPREAKVQWKVDNALQSGNSQESVTEQDSKDSTYSLSSTLTLSKADYEKHKVYACEVTHQGLSSPVTKSFNRGEC

SEQ ID NO: 4985 - protein, 214 aa, synthetic construct
  REGION 1..214: note = B60-55_VK-CK/Q38E/V133K
EIVMTQSPATLSLSPGERATLSCRASQSVGIHLAWYQEKLGQAPRLLIYGASSRATGIPDRFSGSGSGTDFTLTISRLEPEDFAVYYCQQYGSLPRTFGQGTKVEIKRTVAAPSVFIFPPSDEQLKSGTASVKCLLNNFYPREAKVQWKVDNALQSGNSQESVTEQDSKDSTYSLSSTLTLSKADYEKHKVYACEVTHQGLSSPVTKSFNRGEC

SEQ ID NO: 4986 - protein, 214 aa, synthetic construct
  REGION 1..214: note = B60-55_VK-CK/Q38K/V133K
EIVMTQSPATLSLSPGERATLSCRASQSVGIHLAWYQKKLGQAPRLLIYGASSRATGIPDRFSGSGSGTDFTLTISRLEPEDFAVYYCQQYGSLPRTFGQGTKVEIKRTVAAPSVFIFPPSDEQLKSGTASVKCLLNNFYPREAKVQWKVDNALQSGNSQESVTEQDSKDSTYSLSSTLTLSKADYEKHKVYACEVTHQGLSSPVTKSFNRGEC

SEQ ID NO: 4987 - protein, 605 aa, synthetic construct
  REGION 1..605: note = Tr_VH-CH1/N84S/Q39K/S183E/CLD201/hole/RF
EVQLVESGGGLVQPGGSLRLSCAASGFNIKDTYIHWVRKAPGKGLEWVARIYPTNGYTRYADSVKGRFTISADTSKNTAYLQMSSLRAEDTAVYYCSRWGGDGFYAMDYWGQGTLVTVSSASTKGPSVFPLAPSSKSTSGGTAALGCLVKDYFPEPVTVSWNSGALTSGVHTFPAVLQSSGLYSLESVVTVPSSSLGTQTYICNVNHKPSNTKVDKKVEPKSCTDWSPYADQSIKVRISLKSALGDKAYEWNDNEMYLFRSSVAYAMRQYFLKVKNQMILFGEEDVRVANLKPRISFNFFVTAPKNVSDIIPRTEVEKAIRMSRSRINDAFRLNDNSLEFLGIQPTLGPPNQPPVSTSTSPTRSMAPGAVHLPQPVSTRDKTHTCPPCPAPELLGGPSVFLFPPKPKDTLMISRTPEVTCVVVDVSHEDPEVKFNWYVDGVEVHNAKTKPREEQYNSTYRVVSVLTVLHQDWLNGKEYKCKVSNKALPAPIEKTISKAKGQPREPQVCTLPPSRDELTKNQVSLSCAVKGFYPSDIAVEWESNGQPENNYKTTPPVLDSDGSFFLVSKLTVDKSRWQQGNVFSCSVMHEALHNRFTQKSLSLSPG

SEQ ID NO: 4988 - protein, 438 aa, synthetic construct
  REGION 1..438: note = Pt_VK-x-CH1/Q38E/S183K/knob
DIQMTQSPSSLSASVGDRVTITCKASQDVSIGVAWYQEKPGKAPKLLIYSASYRYTGVPSRFSGSGSGTDFTLTISSLQPEDFATYYCQQYYIYPYTFGQGTKVEIKSSASTKGPSVFPLAPSSKSTSGGTAALGCLVKDYFPEPVTVSWNSGALTSGVHTFPAVLQSSGLYSLKSVVTVPSSSLGTQTYICNVNHKPSNTKVDKKVEPKSCDKTHTCPPCPAPELLGGPSVFLFPPKPKDTLMISRTPEVTCVVVDVSHEDPEVKFNWYVDGVEVHNAKTKPREEQYNSTYRVVSVLTVLHQDWLNGKEYKCKVSNKALPAPIEKTISKAKGQPREPQVYTLPPCRDELTKNQVSLWCLVKGFYPSDIAVEWESNGQPENNYKTTPPVLDSDGSFFLYSKLTVDKSRWQQGNVFSCSVMHEALHNHYTQKSLSLSPG

SEQ ID NO: 4989 - protein, 438 aa, synthetic construct
  REGION 1..438: note = Pt_VK-x-CH1/Q38K/S183K/knob
DIQMTQSPSSLSASVGDRVTITCKASQDVSIGVAWYQKKPGKAPKLLIYSASYRYTGVPSRFSGSGSGTDFTLTISSLQPEDFATYYCQQYYIYPYTFGQGTKVEIKSSASTKGPSVFPLAPSSKSTSGGTAALGCLVKDYFPEPVTVSWNSGALTSGVHTFPAVLQSSGLYSLKSVVTVPSSSLGTQTYICNVNHKPSNTKVDKKVEPKSCDKTHTCPPCPAPELLGGPSVFLFPPKPKDTLMISRTPEVTCVVVDVSHEDPEVKFNWYVDGVEVHNAKTKPREEQYNSTYRVVSVLTVLHQDWLNGKEYKCKVSNKALPAPIEKTISKAKGQPREPQVYTLPPCRDELTKNQVSLWCLVKGFYPSDIAVEWESNGQPENNYKTTPPVLDSDGSFFLYSKLTVDKSRWQQGNVFSCSVMHEALHNHYTQKSLSLSPG

SEQ ID NO: 4990 - protein, 605 aa, synthetic construct
  REGION 1..605: note = Tr_VH-CH1/N84S/Q39E/S183E/CLD201/hole/RF
EVQLVESGGGLVQPGGSLRLSCAASGFNIKDTYIHWVREAPGKGLEWVARIYPTNGYTRYADSVKGRFTISADTSKNTAYLQMSSLRAEDTAVYYCSRWGGDGFYAMDYWGQGTLVTVSSASTKGPSVFPLAPSSKSTSGGTAALGCLVKDYFPEPVTVSWNSGALTSGVHTFPAVLQSSGLYSLESVVTVPSSSLGTQTYICNVNHKPSNTKVDKKVEPKSCTDWSPYADQSIKVRISLKSALGDKAYEWNDNEMYLFRSSVAYAMRQYFLKVKNQMILFGEEDVRVANLKPRISFNFFVTAPKNVSDIIPRTEVEKAIRMSRSRINDAFRLNDNSLEFLGIQPTLGPPNQPPVSTSTSPTRSMAPGAVHLPQPVSTRDKTHTCPPCPAPELLGGPSVFLFPPKPKDTLMISRTPEVTCVVVDVSHEDPEVKFNWYVDGVEVHNAKTKPREEQYNSTYRVVSVLTVLHQDWLNGKEYKCKVSNKALPAPIEKTISKAKGQPREPQVCTLPPSRDELTKNQVSLSCAVKGFYPSDIAVEWESNGQPENNYKTTPPVLDSDGSFFLVSKLTVDKSRWQQGNVFSCSVMHEALHNRFTQKSLSLSPG

SEQ ID NO: 4991 - protein, 604 aa, synthetic construct
  REGION 1..604: note = Pt_VH-CH1/N84S/Q39K/S183E/CLD201/hole/RF
EVQLVESGGGLVQPGGSLRLSCAASGFTFTDYTMDWVRKAPGKGLEWVADVNPNSGGSIYNQRFKGRFTLSVDRSKNTLYLQMSSLRAEDTAVYYCARNLGPSFYFDYWGQGTLVTVSSASTKGPSVFPLAPSSKSTSGGTAALGCLVKDYFPEPVTVSWNSGALTSGVHTFPAVLQSSGLYSLESVVTVPSSSLGTQTYICNVNHKPSNTKVDKKVEPKSCTDWSPYADQSIKVRISLKSALGDKAYEWNDNEMYLFRSSVAYAMRQYFLKVKNQMILFGEEDVRVANLKPRISFNFFVTAPKNVSDIIPRTEVEKAIRMSRSRINDAFRLNDNSLEFLGIQPTLGPPNQPPVSTSTSPTRSMAPGAVHLPQPVSTRDKTHTCPPCPAPELLGGPSVFLFPPKPKDTLMISRTPEVTCVVVDVSHEDPEVKFNWYVDGVEVHNAKTKPREEQYNSTYRVVSVLTVLHQDWLNGKEYKCKVSNKALPAPIEKTISKAKGQPREPQVCTLPPSRDELTKNQVSLSCAVKGFYPSDIAVEWESNGQPENNYKTTPPVLDSDGSFFLVSKLTVDKSRWQQGNVFSCSVMHEALHNRFTQKSLSLSPG

SEQ ID NO: 4992 - protein, 438 aa, synthetic construct
  REGION 1..438: note = Tr_VK-x-CH1/Q38E/S183K/knob
DIQMTQSPSSLSASVGDRVTITCRASQDVNTAVAWYQEKPGKAPKLLIYSASFLYSGVPSRFSGSRSGTDFTLTISSLQPEDFATYYCQQHYTTPPTFGQGTKVEIKSSASTKGPSVFPLAPSSKSTSGGTAALGCLVKDYFPEPVTVSWNSGALTSGVHTFPAVLQSSGLYSLKSVVTVPSSSLGTQTYICNVNHKPSNTKVDKKVEPKSCDKTHTCPPCPAPELLGGPSVFLFPPKPKDTLMISRTPEVTCVVVDVSHEDPEVKFNWYVDGVEVHNAKTKPREEQYNSTYRVVSVLTVLHQDWLNGKEYKCKVSNKALPAPIEKTISKAKGQPREPQVYTLPPCRDELTKNQVSLWCLVKGFYPSDIAVEWESNGQPENNYKTTPPVLDSDGSFFLYSKLTVDKSRWQQGNVFSCSVMHEALHNHYTQKSLSLSPG

SEQ ID NO: 4993 - protein, 438 aa, synthetic construct
  REGION 1..438: note = Tr_VK-x-CH1/Q38K/S183K/knob
DIQMTQSPSSLSASVGDRVTITCRASQDVNTAVAWYQKKPGKAPKLLIYSASFLYSGVPSRFSGSRSGTDFTLTISSLQPEDFATYYCQQHYTTPPTFGQGTKVEIKSSASTKGPSVFPLAPSSKSTSGGTAALGCLVKDYFPEPVTVSWNSGALTSGVHTFPAVLQSSGLYSLKSVVTVPSSSLGTQTYICNVNHKPSNTKVDKKVEPKSCDKTHTCPPCPAPELLGGPSVFLFPPKPKDTLMISRTPEVTCVVVDVSHEDPEVKFNWYVDGVEVHNAKTKPREEQYNSTYRVVSVLTVLHQDWLNGKEYKCKVSNKALPAPIEKTISKAKGQPREPQVYTLPPCRDELTKNQVSLWCLVKGFYPSDIAVEWESNGQPENNYKTTPPVLDSDGSFFLYSKLTVDKSRWQQGNVFSCSVMHEALHNHYTQKSLSLSPG

SEQ ID NO: 4994 - protein, 604 aa, synthetic construct
  REGION 1..604: note = Pt_VH-CH1/N84S/Q39E/S183E/CLD201/hole/RF
EVQLVESGGGLVQPGGSLRLSCAASGFTFTDYTMDWVREAPGKGLEWVADVNPNSGGSIYNQRFKGRFTLSVDRSKNTLYLQMSSLRAEDTAVYYCARNLGPSFYFDYWGQGTLVTVSSASTKGPSVFPLAPSSKSTSGGTAALGCLVKDYFPEPVTVSWNSGALTSGVHTFPAVLQSSGLYSLESVVTVPSSSLGTQTYICNVNHKPSNTKVDKKVEPKSCTDWSPYADQSIKVRISLKSALGDKAYEWNDNEMYLFRSSVAYAMRQYFLKVKNQMILFGEEDVRVANLKPRISFNFFVTAPKNVSDIIPRTEVEKAIRMSRSRINDAFRLNDNSLEFLGIQPTLGPPNQPPVSTSTSPTRSMAPGAVHLPQPVSTRDKTHTCPPCPAPELLGGPSVFLFPPKPKDTLMISRTPEVTCVVVDVSHEDPEVKFNWYVDGVEVHNAKTKPREEQYNSTYRVVSVLTVLHQDWLNGKEYKCKVSNKALPAPIEKTISKAKGQPREPQVCTLPPSRDELTKNQVSLSCAVKGFYPSDIAVEWESNGQPENNYKTTPPVLDSDGSFFLVSKLTVDKSRWQQGNVFSCSVMHEALHNRFTQKSLSLSPG

SEQ ID NO: 4995 - protein, 604 aa, synthetic construct
  REGION 1..604: note = Ce_VH-CH1/N84S/Q39K/S183E/CLD201/hole/RF
QVQLKQSGPGLVQPSQSLSITCTVSGFSLTNYGVHWVRKSPGKGLEWLGVIWSGGNTDYNTPFTSRLSINKDNSKSQVFFKMSSLQSNDTAIYYCARALTYYDYEFAYWGQGTLVTVSAASTKGPSVFPLAPSSKSTSGGTAALGCLVKDYFPEPVTVSWNSGALTSGVHTFPAVLQSSGLYSLESVVTVPSSSLGTQTYICNVNHKPSNTKVDKKVEPKSCTDWSPYADQSIKVRISLKSALGDKAYEWNDNEMYLFRSSVAYAMRQYFLKVKNQMILFGEEDVRVANLKPRISFNFFVTAPKNVSDIIPRTEVEKAIRMSRSRINDAFRLNDNSLEFLGIQPTLGPPNQPPVSTSTSPTRSMAPGAVHLPQPVSTRDKTHTCPPCPAPELLGGPSVFLFPPKPKDTLMISRTPEVTCVVVDVSHEDPEVKFNWYVDGVEVHNAKTKPREEQYNSTYRVVSVLTVLHQDWLNGKEYKCKVSNKALPAPIEKTISKAKGQPREPQVCTLPPSRDELTKNQVSLSCAVKGFYPSDIAVEWESNGQPENNYKTTPPVLDSDGSFFLVSKLTVDKSRWQQGNVFSCSVMHEALHNRFTQKSLSLSPG

SEQ ID NO: 4996 - protein, 604 aa, synthetic construct
  REGION 1..604: note = Ce_VH-CH1/N84S/Q39E/S183E/CLD201/hole/RF
QVQLKQSGPGLVQPSQSLSITCTVSGFSLTNYGVHWVRESPGKGLEWLGVIWSGGNTDYNTPFTSRLSINKDNSKSQVFFKMSSLQSNDTAIYYCARALTYYDYEFAYWGQGTLVTVSAASTKGPSVFPLAPSSKSTSGGTAALGCLVKDYFPEPVTVSWNSGALTSGVHTFPAVLQSSGLYSLESVVTVPSSSLGTQTYICNVNHKPSNTKVDKKVEPKSCTDWSPYADQSIKVRISLKSALGDKAYEWNDNEMYLFRSSVAYAMRQYFLKVKNQMILFGEEDVRVANLKPRISFNFFVTAPKNVSDIIPRTEVEKAIRMSRSRINDAFRLNDNSLEFLGIQPTLGPPNQPPVSTSTSPTRSMAPGAVHLPQPVSTRDKTHTCPPCPAPELLGGPSVFLFPPKPKDTLMISRTPEVTCVVVDVSHEDPEVKFNWYVDGVEVHNAKTKPREEQYNSTYRVVSVLTVLHQDWLNGKEYKCKVSNKALPAPIEKTISKAKGQPREPQVCTLPPSRDELTKNQVSLSCAVKGFYPSDIAVEWESNGQPENNYKTTPPVLDSDGSFFLVSKLTVDKSRWQQGNVFSCSVMHEALHNRFTQKSLSLSPG

SEQ ID NO: 4997 - protein, 438 aa, synthetic construct
  REGION 1..438: note = Ce_VK-x-CH1/Q38E/S183K/knob
DILLTQSPVILSVSPGERVSFSCRASQSIGTNIHWYQERTNGSPRLLIKYASESISGIPSRFSGSGSGTDFTLSINSVESEDIADYYCQQNNNWPTTFGAGTKVEIKSSASTKGPSVFPLAPSSKSTSGGTAALGCLVKDYFPEPVTVSWNSGALTSGVHTFPAVLQSSGLYSLKSVVTVPSSSLGTQTYICNVNHKPSNTKVDKKVEPKSCDKTHTCPPCPAPELLGGPSVFLFPPKPKDTLMISRTPEVTCVVVDVSHEDPEVKFNWYVDGVEVHNAKTKPREEQYNSTYRVVSVLTVLHQDWLNGKEYKCKVSNKALPAPIEKTISKAKGQPREPQVYTLPPCRDELTKNQVSLWCLVKGFYPSDIAVEWESNGQPENNYKTTPPVLDSDGSFFLYSKLTVDKSRWQQGNVFSCSVMHEALHNHYTQKSLSLSPG

SEQ ID NO: 4998 - protein, 438 aa, synthetic construct
  REGION 1..438: note = Ce_VK-x-CH1/Q38K/S183K/knob
DILLTQSPVILSVSPGERVSFSCRASQSIGTNIHWYQKRTNGSPRLLIKYASESISGIPSRFSGSGSGTDFTLSINSVESEDIADYYCQQNNNWPTTFGAGTKVEIKSSASTKGPSVFPLAPSSKSTSGGTAALGCLVKDYFPEPVTVSWNSGALTSGVHTFPAVLQSSGLYSLKSVVTVPSSSLGTQTYICNVNHKPSNTKVDKKVEPKSCDKTHTCPPCPAPELLGGPSVFLFPPKPKDTLMISRTPEVTCVVVDVSHEDPEVKFNWYVDGVEVHNAKTKPREEQYNSTYRVVSVLTVLHQDWLNGKEYKCKVSNKALPAPIEKTISKAKGQPREPQVYTLPPCRDELTKNQVSLWCLVKGFYPSDIAVEWESNGQPENNYKTTPPVLDSDGSFFLYSKLTVDKSRWQQGNVFSCSVMHEALHNHYTQKSLSLSPG

SEQ ID NO: 4999 - protein, 605 aa, synthetic construct
  REGION 1..605: note = Tr_VH-CH1/N84S/Q39K/S183E/CLD201/hole/PGLALA/RF
EVQLVESGGGLVQPGGSLRLSCAASGFNIKDTYIHWVRKAPGKGLEWVARIYPTNGYTRYADSVKGRFTISADTSKNTAYLQMSSLRAEDTAVYYCSRWGGDGFYAMDYWGQGTLVTVSSASTKGPSVFPLAPSSKSTSGGTAALGCLVKDYFPEPVTVSWNSGALTSGVHTFPAVLQSSGLYSLESVVTVPSSSLGTQTYICNVNHKPSNTKVDKKVEPKSCTDWSPYADQSIKVRISLKSALGDKAYEWNDNEMYLFRSSVAYAMRQYFLKVKNQMILFGEEDVRVANLKPRISFNFFVTAPKNVSDIIPRTEVEKAIRMSRSRINDAFRLNDNSLEFLGIQPTLGPPNQPPVSTSTSPTRSMAPGAVHLPQPVSTRDKTHTCPPCPAPEAAGGPSVFLFPPKPKDTLMISRTPEVTCVVVDVSHEDPEVKFNWYVDGVEVHNAKTKPREEQYNSTYRVVSVLTVLHQDWLNGKEYKCKVSNKALGAPIEKTISKAKGQPREPQVCTLPPSRDELTKNQVSLSCAVKGFYPSDIAVEWESNGQPENNYKTTPPVLDSDGSFFLVSKLTVDKSRWQQGNVFSCSVMHEALHNRFTQKSLSLSPG

SEQ ID NO: 5000 - protein, 443 aa, synthetic construct; identical to SEQ ID NO: 4932
  REGION 1..443: note = 388D4-3_VK-x-CH1/Q38E/S183K/knob/PGLALA

SEQ ID NO: 5001 - protein, 443 aa, synthetic construct; identical to SEQ ID NO: 4933
  REGION 1..443: note = 388D4-3_VK-x-CH1/Q38K/S183K/knob/PGLALA

SEQ ID NO: 5002 - protein, 605 aa, synthetic construct
  REGION 1..605: note = Tr_VH-CH1/N84S/Q39E/S183E/CLD201/hole/PGLALA/RF
EVQLVESGGGLVQPGGSLRLSCAASGFNIKDTYIHWVREAPGKGLEWVARIYPTNGYTRYADSVKGRFTISADTSKNTAYLQMSSLRAEDTAVYYCSRWGGDGFYAMDYWGQGTLVTVSSASTKGPSVFPLAPSSKSTSGGTAALGCLVKDYFPEPVTVSWNSGALTSGVHTFPAVLQSSGLYSLESVVTVPSSSLGTQTYICNVNHKPSNTKVDKKVEPKSCTDWSPYADQSIKVRISLKSALGDKAYEWNDNEMYLFRSSVAYAMRQYFLKVKNQMILFGEEDVRVANLKPRISFNFFVTAPKNVSDIIPRTEVEKAIRMSRSRINDAFRLNDNSLEFLGIQPTLGPPNQPPVSTSTSPTRSMAPGAVHLPQPVSTRDKTHTCPPCPAPEAAGGPSVFLFPPKPKDTLMISRTPEVTCVVVDVSHEDPEVKFNWYVDGVEVHNAKTKPREEQYNSTYRVVSVLTVLHQDWLNGKEYKCKVSNKALGAPIEKTISKAKGQPREPQVCTLPPSRDELTKNQVSLSCAVKGFYPSDIAVEWESNGQPENNYKTTPPVLDSDGSFFLVSKLTVDKSRWQQGNVFSCSVMHEALHNRFTQKSLSLSPG

SEQ ID NO: 5003 - protein, 605 aa, synthetic construct; identical to SEQ ID NO: 4930
  REGION 1..605: note = 388D4-3_VH-CH1/Q39K/S183E/CLD201/hole/PGLALA/RF

SEQ ID NO: 5004 - protein, 438 aa, synthetic construct
  REGION 1..438: note = Tr_VK-x-CH1/Q38E/S183K/knob/PGLALA
DIQMTQSPSSLSASVGDRVTITCRASQDVNTAVAWYQEKPGKAPKLLIYSASFLYSGVPSRFSGSRSGTDFTLTISSLQPEDFATYYCQQHYTTPPTFGQGTKVEIKSSASTKGPSVFPLAPSSKSTSGGTAALGCLVKDYFPEPVTVSWNSGALTSGVHTFPAVLQSSGLYSLKSVVTVPSSSLGTQTYICNVNHKPSNTKVDKKVEPKSCDKTHTCPPCPAPEAAGGPSVFLFPPKPKDTLMISRTPEVTCVVVDVSHEDPEVKFNWYVDGVEVHNAKTKPREEQYNSTYRVVSVLTVLHQDWLNGKEYKCKVSNKALGAPIEKTISKAKGQPREPQVYTLPPCRDELTKNQVSLWCLVKGFYPSDIAVEWESNGQPENNYKTTPPVLDSDGSFFLYSKLTVDKSRWQQGNVFSCSVMHEALHNHYTQKSLSLSPG

SEQ ID NO: 5005 - protein, 438 aa, synthetic construct
  REGION 1..438: note = Tr_VK-x-CH1/Q38K/S183K/knob/PGLALA
DIQMTQSPSSLSASVGDRVTITCRASQDVNTAVAWYQKKPGKAPKLLIYSASFLYSGVPSRFSGSRSGTDFTLTISSLQPEDFATYYCQQHYTTPPTFGQGTKVEIKSSASTKGPSVFPLAPSSKSTSGGTAALGCLVKDYFPEPVTVSWNSGALTSGVHTFPAVLQSSGLYSLKSVVTVPSSSLGTQTYICNVNHKPSNTKVDKKVEPKSCDKTHTCPPCPAPEAAGGPSVFLFPPKPKDTLMISRTPEVTCVVVDVSHEDPEVKFNWYVDGVEVHNAKTKPREEQYNSTYRVVSVLTVLHQDWLNGKEYKCKVSNKALGAPIEKTISKAKGQPREPQVYTLPPCRDELTKNQVSLWCLVKGFYPSDIAVEWESNGQPENNYKTTPPVLDSDGSFFLYSKLTVDKSRWQQGNVFSCSVMHEALHNHYTQKSLSLSPG

SEQ ID NO: 5006 - protein, 605 aa, synthetic construct; identical to SEQ ID NO: 4931
  REGION 1..605: note = 388D4-3_VH-CH1/Q39E/S183E/CLD201/hole/PGLALA/RF

SEQ ID NO: 5007 - protein, 604 aa, synthetic construct
  REGION 1..604: note = Ce_VH-CH1/N84S/Q39K/S183E/CLD201/hole/PGLALA/RF
QVQLKQSGPGLVQPSQSLSITCTVSGFSLTNYGVHWVRKSPGKGLEWLGVIWSGGNTDYNTPFTSRLSINKDNSKSQVFFKMSSLQSNDTAIYYCARALTYYDYEFAYWGQGTLVTVSAASTKGPSVFPLAPSSKSTSGGTAALGCLVKDYFPEPVTVSWNSGALTSGVHTFPAVLQSSGLYSLESVVTVPSSSLGTQTYICNVNHKPSNTKVDKKVEPKSCTDWSPYADQSIKVRISLKSALGDKAYEWNDNEMYLFRSSVAYAMRQYFLKVKNQMILFGEEDVRVANLKPRISFNFFVTAPKNVSDIIPRTEVEKAIRMSRSRINDAFRLNDNSLEFLGIQPTLGPPNQPPVSTSTSPTRSMAPGAVHLPQPVSTRDKTHTCPPCPAPEAAGGPSVFLFPPKPKDTLMISRTPEVTCVVVDVSHEDPEVKFNWYVDGVEVHNAKTKPREEQYNSTYRVVSVLTVLHQDWLNGKEYKCKVSNKALGAPIEKTISKAKGQPREPQVCTLPPSRDELTKNQVSLSCAVKGFYPSDIAVEWESNGQPENNYKTTPPVLDSDGSFFLVSKLTVDKSRWQQGNVFSCSVMHEALHNRFTQKSLSLSPG

SEQ ID NO: 5008 - protein, 604 aa, synthetic construct
  REGION 1..604: note = Ce_VH-CH1/N84S/Q39E/S183E/CLD201/hole/PGLALA/RF
QVQLKQSGPGLVQPSQSLSITCTVSGFSLTNYGVHWVRESPGKGLEWLGVIWSGGNTDYNTPFTSRLSINKDNSKSQVFFKMSSLQSNDTAIYYCARALTYYDYEFAYWGQGTLVTVSAASTKGPSVFPLAPSSKSTSGGTAALGCLVKDYFPEPVTVSWNSGALTSGVHTFPAVLQSSGLYSLESVVTVPSSSLGTQTYICNVNHKPSNTKVDKKVEPKSCTDWSPYADQSIKVRISLKSALGDKAYEWNDNEMYLFRSSVAYAMRQYFLKVKNQMILFGEEDVRVANLKPRISFNFFVTAPKNVSDIIPRTEVEKAIRMSRSRINDAFRLNDNSLEFLGIQPTLGPPNQPPVSTSTSPTRSMAPGAVHLPQPVSTRDKTHTCPPCPAPEAAGGPSVFLFPPKPKDTLMISRTPEVTCVVVDVSHEDPEVKFNWYVDGVEVHNAKTKPREEQYNSTYRVVSVLTVLHQDWLNGKEYKCKVSNKALGAPIEKTISKAKGQPREPQVCTLPPSRDELTKNQVSLSCAVKGFYPSDIAVEWESNGQPENNYKTTPPVLDSDGSFFLVSKLTVDKSRWQQGNVFSCSVMHEALHNRFTQKSLSLSPG

SEQ ID NO: 5009 - protein, 438 aa, synthetic construct
  REGION 1..438: note = Ce_VK-x-CH1/Q38E/S183K/knob/PGLALA
DILLTQSPVILSVSPGERVSFSCRASQSIGTNIHWYQERTNGSPRLLIKYASESISGIPSRFSGSGSGTDFTLSINSVESEDIADYYCQQNNNWPTTFGAGTKVEIKSSASTKGPSVFPLAPSSKSTSGGTAALGCLVKDYFPEPVTVSWNSGALTSGVHTFPAVLQSSGLYSLKSVVTVPSSSLGTQTYICNVNHKPSNTKVDKKVEPKSCDKTHTCPPCPAPEAAGGPSVFLFPPKPKDTLMISRTPEVTCVVVDVSHEDPEVKFNWYVDGVEVHNAKTKPREEQYNSTYRVVSVLTVLHQDWLNGKEYKCKVSNKALGAPIEKTISKAKGQPREPQVYTLPPCRDELTKNQVSLWCLVKGFYPSDIAVEWESNGQPENNYKTTPPVLDSDGSFFLYSKLTVDKSRWQQGNVFSCSVMHEALHNHYTQKSLSLSPG

SEQ ID NO: 5010 - protein, 438 aa, synthetic construct
  REGION 1..438: note = Ce_VK-x-CH1/Q38K/S183K/knob/PGLALA
DILLTQSPVILSVSPGERVSFSCRASQSIGTNIHWYQKRTNGSPRLLIKYASESISGIPSRFSGSGSGTDFTLSINSVESEDIADYYCQQNNNWPTTFGAGTKVEIKSSASTKGPSVFPLAPSSKSTSGGTAALGCLVKDYFPEPVTVSWNSGALTSGVHTFPAVLQSSGLYSLKSVVTVPSSSLGTQTYICNVNHKPSNTKVDKKVEPKSCDKTHTCPPCPAPEAAGGPSVFLFPPKPKDTLMISRTPEVTCVVVDVSHEDPEVKFNWYVDGVEVHNAKTKPREEQYNSTYRVVSVLTVLHQDWLNGKEYKCKVSNKALGAPIEKTISKAKGQPREPQVYTLPPCRDELTKNQVSLWCLVKGFYPSDIAVEWESNGQPENNYKTTPPVLDSDGSFFLYSKLTVDKSRWQQGNVFSCSVMHEALHNHYTQKSLSLSPG

SEQ ID NO: 5011 - protein, 438 aa, synthetic construct; identical to SEQ ID NO: 4967
  REGION 1..438: note = B60-55_VK-x-CH1/Q38E/S183K/knob/PGLALA

SEQ ID NO: 5012 - protein, 438 aa, synthetic construct; identical to SEQ ID NO: 4968
  REGION 1..438: note = B60-55_VK-x-CH1/Q38K/S183K/knob/PGLALA

SEQ ID NO: 5013 - protein, 605 aa, synthetic construct; identical to SEQ ID NO: 4969
  REGION 1..605: note = B60-55_VH-CH1/Q39K/S183E/CLD201/hole/PGLALA/RF

SEQ ID NO: 5014 - protein, 605 aa, synthetic construct; identical to SEQ ID NO: 4970
  REGION 1..605: note = B60-55_VH-CH1/Q39E/S183E/CLD201/hole/PGLALA/RF

SEQ ID NO: 5015 - protein, 214 aa, synthetic construct
  REGION 1..214: note = Tr_VK-CK/Q38E/V133K
DIQMTQSPSSLSASVGDRVTITCRASQDVNTAVAWYQEKPGKAPKLLIYSASFLYSGVPSRFSGSRSGTDFTLTISSLQPEDFATYYCQQHYTTPPTFGQGTKVEIKRTVAAPSVFIFPPSDEQLKSGTASVKCLLNNFYPREAKVQWKVDNALQSGNSQESVTEQDSKDSTYSLSSTLTLSKADYEKHKVYACEVTHQGLSSPVTKSFNRGEC

SEQ ID NO: 5016 - protein, 226 aa, synthetic construct
  REGION 1..226: note = Pt_VH-x-CK/N84S/Q39K/V133E
EVQLVESGGGLVQPGGSLRLSCAASGFTFTDYTMDWVRKAPGKGLEWVADVNPNSGGSIYNQRFKGRFTLSVDRSKNTLYLQMSSLRAEDTAVYYCARNLGPSFYFDYWGQGTLVTVSSASVAAPSVFIFPPSDEQLKSGTASVECLLNNFYPREAKVQWKVDNALQSGNSQESVTEQDSKDSTYSLSSTLTLSKADYEKHKVYACEVTHQGLSSPVTKSFNRGEC

SEQ ID NO: 5017 - protein, 226 aa, synthetic construct
  REGION 1..226: note = Pt_VH-x-CK/N84S/Q39E/V133E
EVQLVESGGGLVQPGGSLRLSCAASGFTFTDYTMDWVREAPGKGLEWVADVNPNSGGSIYNQRFKGRFTLSVDRSKNTLYLQMSSLRAEDTAVYYCARNLGPSFYFDYWGQGTLVTVSSASVAAPSVFIFPPSDEQLKSGTASVECLLNNFYPREAKVQWKVDNALQSGNSQESVTEQDSKDSTYSLSSTLTLSKADYEKHKVYACEVTHQGLSSPVTKSFNRGEC

SEQ ID NO: 5018 - protein, 214 aa, synthetic construct
  REGION 1..214: note = Tr_VK-CK/Q38K/V133K
DIQMTQSPSSLSASVGDRVTITCRASQDVNTAVAWYQKKPGKAPKLLIYSASFLYSGVPSRFSGSRSGTDFTLTISSLQPEDFATYYCQQHYTTPPTFGQGTKVEIKRTVAAPSVFIFPPSDEQLKSGTASVKCLLNNFYPREAKVQWKVDNALQSGNSQESVTEQDSKDSTYSLSSTLTLSKADYEKHKVYACEVTHQGLSSPVTKSFNRGEC

SEQ ID NO: 5019 - protein, 214 aa, synthetic construct
  REGION 1..214: note = Pt_VK-CK/Q38E/V133K
DIQMTQSPSSLSASVGDRVTITCKASQDVSIGVAWYQEKPGKAPKLLIYSASYRYTGVPSRFSGSGSGTDFTLTISSLQPEDFATYYCQQYYIYPYTFGQGTKVEIKRTVAAPSVFIFPPSDEQLKSGTASVKCLLNNFYPREAKVQWKVDNALQSGNSQESVTEQDSKDSTYSLSSTLTLSKADYEKHKVYACEVTHQGLSSPVTKSFNRGEC

SEQ ID NO: 5020 - protein, 227 aa, synthetic construct
  REGION 1..227: note = Tr_VH-x-CK/N84S/Q39K/V133E
EVQLVESGGGLVQPGGSLRLSCAASGFNIKDTYIHWVRKAPGKGLEWVARIYPTNGYTRYADSVKGRFTISADTSKNTAYLQMSSLRAEDTAVYYCSRWGGDGFYAMDYWGQGTLVTVSSASVAAPSVFIFPPSDEQLKSGTASVECLLNNFYPREAKVQWKVDNALQSGNSQESVTEQDSKDSTYSLSSTLTLSKADYEKHKVYACEVTHQGLSSPVTKSFNRGEC

SEQ ID NO: 5021 - protein, 227 aa, synthetic construct
  REGION 1..227: note = Tr_VH-x-CK/N84S/Q39E/V133E
EVQLVESGGGLVQPGGSLRLSCAASGFNIKDTYIHWVREAPGKGLEWVARIYPTNGYTRYADSVKGRFTISADTSKNTAYLQMSSLRAEDTAVYYCSRWGGDGFYAMDYWGQGTLVTVSSASVAAPSVFIFPPSDEQLKSGTASVECLLNNFYPREAKVQWKVDNALQSGNSQESVTEQDSKDSTYSLSSTLTLSKADYEKHKVYACEVTHQGLSSPVTKSFNRGEC

SEQ ID NO: 5022 - protein, 214 aa, synthetic construct
  REGION 1..214: note = Pt_VK-CK/Q38K/V133K
DIQMTQSPSSLSASVGDRVTITCKASQDVSIGVAWYQKKPGKAPKLLIYSASYRYTGVPSRFSGSGSGTDFTLTISSLQPEDFATYYCQQYYIYPYTFGQGTKVEIKRTVAAPSVFIFPPSDEQLKSGTASVKCLLNNFYPREAKVQWKVDNALQSGNSQESVTEQDSKDSTYSLSSTLTLSKADYEKHKVYACEVTHQGLSSPVTKSFNRGEC

SEQ ID NO: 5023 - protein, 214 aa, synthetic construct
  REGION 1..214: note = Ce_VK-CK/Q38E/V133K
DILLTQSPVILSVSPGERVSFSCRASQSIGTNIHWYQERTNGSPRLLIKYASESISGIPSRFSGSGSGTDFTLSINSVESEDIADYYCQQNNNWPTTFGAGTKLELKRTVAAPSVFIFPPSDEQLKSGTASVKCLLNNFYPREAKVQWKVDNALQSGNSQESVTEQDSKDSTYSLSSTLTLSKADYEKHKVYACEVTHQGLSSPVTKSFNRGEC

SEQ ID NO: 5024 - protein, 214 aa, synthetic construct
  REGION 1..214: note = Ce _VK-CK/Q38K/V133K
DILLTQSPVILSVSPGERVSFSCRASQSIGTNIHWYQKRTNGSPRLLIKYASESISGIPSRFSGSGSGTDFTLSINSVESEDIADYYCQQNNNWPTTFGAGTKLELKRTVAAPSVFIFPPSDEQLKSGTASVKCLLNNFYPREAKVQWKVDNALQSGNSQESVTEQDSKDSTYSLSSTLTLSKADYEKHKVYACEVTHQGLSSPVTKSFNRGEC

SEQ ID NO: 5025 - protein, 226 aa, synthetic construct
  REGION 1..226: note = Ce_VH-x-CK/N84S/Q39K/V133E
QVQLKQSGPGLVQPSQSLSITCTVSGFSLTNYGVHWVRKSPGKGLEWLGVIWSGGNTDYNTPFTSRLSINKDNSKSQVFFKMSSLQSNDTAIYYCARALTYYDYEFAYWGQGTLVTVSSASVAAPSVFIFPPSDEQLKSGTASVECLLNNFYPREAKVQWKVDNALQSGNSQESVTEQDSKDSTYSLSSTLTLSKADYEKHKVYACEVTHQGLSSPVTKSFNRGEC

SEQ ID NO: 5026 - protein, 226 aa, synthetic construct
  REGION 1..226: note = Ce_VH-x-CK/N84S/Q39E/V133E
QVQLKQSGPGLVQPSQSLSITCTVSGFSLTNYGVHWVRESPGKGLEWLGVIWSGGNTDYNTPFTSRLSINKDNSKSQVFFKMSSLQSNDTAIYYCARALTYYDYEFAYWGQGTLVTVSSASVAAPSVFIFPPSDEQLKSGTASVECLLNNFYPREAKVQWKVDNALQSGNSQESVTEQDSKDSTYSLSSTLTLSKADYEKHKVYACEVTHQGLSSPVTKSFNRGEC

SEQ ID NO: 5027 - protein, 227 aa, synthetic construct; identical to SEQ ID NO: 4948
  REGION 1..227: note = 388D4-3_VH-x-CK/Q39K/V133E

SEQ ID NO: 5028 - protein, 227 aa, synthetic construct; identical to SEQ ID NO: 4949
  REGION 1..227: note = 388D4-3_VH-x-CK/Q39E/V133E

SEQ ID NO: 5029 - protein, 219 aa, synthetic construct; identical to SEQ ID NO: 4946
  REGION 1..219: note = 388D4-3_VK-CK/Q38E/V133K

SEQ ID NO: 5030 - protein, 219 aa, synthetic construct; identical to SEQ ID NO: 4947
  REGION 1..219: note = 388D4-3_VK-CK/Q38K/V133K

SEQ ID NO: 5031 - protein, 227 aa, synthetic construct; identical to SEQ ID NO: 4983
  REGION 1..227: note = B60-55_VH-x-CK/Q39K/V133E

SEQ ID NO: 5032 - protein, 227 aa, synthetic construct; identical to SEQ ID NO: 4984
  REGION 1..227: note = B60-55_VH-x-CK/Q39E/V133E

SEQ ID NO: 5033 - protein, 214 aa, synthetic construct; identical to SEQ ID NO: 4985
  REGION 1..214: note = B60-55_VK-CK/Q38E/V133K

SEQ ID NO: 5034 - protein, 214 aa, synthetic construct; identical to SEQ ID NO: 4986
  REGION 1..214: note = B60-55_VK-CK/Q38K/V133K

SEQ ID NO: 5035 - protein, 1185 aa, synthetic construct
  REGION 1..1185: note = R_VH-CH1/Q39K/S183E/CLD201/hole/PGLALA/RF/41BBL
QVQLQQPGAELVKPGASVKMSCKASGYTFTSYNMHWVKKTPGRGLEWIGAIYPGNGDTSYNQKFKGKATLTADKSSSTAYMQLSSLTSEDSAVYYCARSTYYGGDWYFNVWGAGTTVTVSAASTKGPSVFPLAPSSKSTSGGTAALGCLVKDYFPEPVTVSWNSGALTSGVHTFPAVLQSSGLYSLESVVTVPSSSLGTQTYICNVNHKPSNTKVDKKVEPKSCTDWSPYADQSIKVRISLKSALGDKAYEWNDNEMYLFRSSVAYAMRQYFLKVKNQMILFGEEDVRVANLKPRISFNFFVTAPKNVSDIIPRTEVEKAIRMSRSRINDAFRLNDNSLEFLGIQPTLGPPNQPPVSTSTSPTRSMAPGAVHLPQPVSTRDKTHTCPPCPAPEAAGGPSVFLFPPKPKDTLMISRTPEVTCVVVDVSHEDPEVKFNWYVDGVEVHNAKTKPREEQYNSTYRVVSVLTVLHQDWLNGKEYKCKVSNKALGAPIEKTISKAKGQPREPQVCTLPPSRDELTKNQVSLSCAVKGFYPSDIAVEWESNGQPENNYKTTPPVLDSDGSFFLVSKLTVDKSRWQQGNVFSCSVMHEALHNRFTQKSLSLSPGGGGSGGGGSREGPELSPDDPAGLLDLRQGMFAQLVAQNVLLIDGPLSWYSDPGLAGVSLTGGLSYKEDTKELVVAKAGVYYVFFQLELRRVVAGEGSGSVSLALHLQPLRSAAGAAALALTVDLPPASSEARNSAFGFQGRLLHLSAGQRLGVHLHTEARARHAWQLTQGATVLGLFRVTPEIPAGLPSPRSEGGGSGGGGSREGPELSPDDPAGLLDLRQGMFAQLVAQNVLLIDGPLSWYSDPGLAGVSLTGGLSYKEDTKELVVAKAGVYYVFFQLELRRVVAGEGSGSVSLALHLQPLRSAAGAAALALTVDLPPASSEARNSAFGFQGRLLHLSAGQRLGVHLHTEARARHAWQLTQGATVLGLFRVTPEIPAGLPSPRSEGGGSGGGGSREGPELSPDDPAGLLDLRQGMFAQLVAQNVLLIDGPLSWYSDPGLAGVSLTGGLSYKEDTKELVVAKAGVYYVFFQLELRRVVAGEGSGSVSLALHLQPLRSAAGAAALALTVDLPPASSEARNSAFGFQGRLLHLSAGQRLGVHLHTEARARHAWQLTQGATVLGLFRVTPEIPAGLPSPRSE

SEQ ID NO: 5036 - protein, 440 aa, synthetic construct; identical to SEQ ID NO: 661
  REGION 1..440: note = Sp34_VK-CH1/knob/Q38E/S183K/PGLALA/RF

SEQ ID NO: 5037 - protein, 440 aa, synthetic construct; identical to SEQ ID NO: 662
  REGION 1..440: note = Sp34_VK-CH1/knob/Q38K/S183K/PGLALA/RF

SEQ ID NO: 5038 - protein, 606 aa, synthetic construct; identical to SEQ ID NO: 725
  REGION 1..606: note = R_VH-CH1/Q39K/S183E/CLD201/hole/PGLALA/RF

SEQ ID NO: 5039 - protein, 1019 aa, synthetic construct
  REGION 1..1019: note = Sp34_VK-CH1/knob/Q38E/S183K/PGLALA/RF/41BBL
QAVVTQEPSLTVSPGGTVTLTCGSSTGAVTTSNYANWVQEKPGQAFRGLIGGTNKRAPGTPARFSGSLLGGKAALTLSGAQPEDEAEYYCALWYSNLWVFGGGTKLTVLSSASTKGPSVFPLAPSSKSTSGGTAALGCLVKDYFPEPVTVSWNSGALTSGVHTFPAVLQSSGLYSLKSVVTVPSSSLGTQTYICNVNHKPSNTKVDKKVEPKSCDKTHTCPPCPAPEAAGGPSVFLFPPKPKDTLMISRTPEVTCVVVDVSHEDPEVKFNWYVDGVEVHNAKTKPREEQYNSTYRVVSVLTVLHQDWLNGKEYKCKVSNKALGAPIEKTISKAKGQPREPQVYTLPPCRDELTKNQVSLWCLVKGFYPSDIAVEWESNGQPENNYKTTPPVLDSDGSFFLYSKLTVDKSRWQQGNVFSCSVMHEALHNRFTQKSLSLSPGGGGSGGGGSREGPELSPDDPAGLLDLRQGMFAQLVAQNVLLIDGPLSWYSDPGLAGVSLTGGLSYKEDTKELVVAKAGVYYVFFQLELRRVVAGEGSGSVSLALHLQPLRSAAGAAALALTVDLPPASSEARNSAFGFQGRLLHLSAGQRLGVHLHTEARARHAWQLTQGATVLGLFRVTPEIPAGLPSPRSEGGGSGGGGSREGPELSPDDPAGLLDLRQGMFAQLVAQNVLLIDGPLSWYSDPGLAGVSLTGGLSYKEDTKELVVAKAGVYYVFFQLELRRVVAGEGSGSVSLALHLQPLRSAAGAAALALTVDLPPASSEARNSAFGFQGRLLHLSAGQRLGVHLHTEARARHAWQLTQGATVLGLFRVTPEIPAGLPSPRSEGGGSGGGGSREGPELSPDDPAGLLDLRQGMFAQLVAQNVLLIDGPLSWYSDPGLAGVSLTGGLSYKEDTKELVVAKAGVYYVFFQLELRRVVAGEGSGSVSLALHLQPLRSAAGAAALALTVDLPPASSEARNSAFGFQGRLLHLSAGQRLGVHLHTEARARHAWQLTQGATVLGLFRVTPEIPAGLPSPRSE

SEQ ID NO: 5040 - protein, 1019 aa, synthetic construct
  REGION 1..1019: note = Sp34_VK-CH1/knob/Q38K/S183K/PGLALA/RF/41BBL
QAVVTQEPSLTVSPGGTVTLTCGSSTGAVTTSNYANWVQKKPGQAFRGLIGGTNKRAPGTPARFSGSLLGGKAALTLSGAQPEDEAEYYCALWYSNLWVFGGGTKLTVLSSASTKGPSVFPLAPSSKSTSGGTAALGCLVKDYFPEPVTVSWNSGALTSGVHTFPAVLQSSGLYSLKSVVTVPSSSLGTQTYICNVNHKPSNTKVDKKVEPKSCDKTHTCPPCPAPEAAGGPSVFLFPPKPKDTLMISRTPEVTCVVVDVSHEDPEVKFNWYVDGVEVHNAKTKPREEQYNSTYRVVSVLTVLHQDWLNGKEYKCKVSNKALGAPIEKTISKAKGQPREPQVYTLPPCRDELTKNQVSLWCLVKGFYPSDIAVEWESNGQPENNYKTTPPVLDSDGSFFLYSKLTVDKSRWQQGNVFSCSVMHEALHNRFTQKSLSLSPGGGGSGGGGSREGPELSPDDPAGLLDLRQGMFAQLVAQNVLLIDGPLSWYSDPGLAGVSLTGGLSYKEDTKELVVAKAGVYYVFFQLELRRVVAGEGSGSVSLALHLQPLRSAAGAAALALTVDLPPASSEARNSAFGFQGRLLHLSAGQRLGVHLHTEARARHAWQLTQGATVLGLFRVTPEIPAGLPSPRSEGGGSGGGGSREGPELSPDDPAGLLDLRQGMFAQLVAQNVLLIDGPLSWYSDPGLAGVSLTGGLSYKEDTKELVVAKAGVYYVFFQLELRRVVAGEGSGSVSLALHLQPLRSAAGAAALALTVDLPPASSEARNSAFGFQGRLLHLSAGQRLGVHLHTEARARHAWQLTQGATVLGLFRVTPEIPAGLPSPRSEGGGSGGGGSREGPELSPDDPAGLLDLRQGMFAQLVAQNVLLIDGPLSWYSDPGLAGVSLTGGLSYKEDTKELVVAKAGVYYVFFQLELRRVVAGEGSGSVSLALHLQPLRSAAGAAALALTVDLPPASSEARNSAFGFQGRLLHLSAGQRLGVHLHTEARARHAWQLTQGATVLGLFRVTPEIPAGLPSPRSE

SEQ ID NO: 5041 - protein, 594 aa, synthetic construct; identical to SEQ ID NO: 4666
  REGION 1..594: note = R_VH-CH1/Q39K/S183E/CLD201/Sp34_VK-CH1/Q38E/S183K

SEQ ID NO: 5042 - protein, 594 aa, synthetic construct; identical to SEQ ID NO: 4667
  REGION 1..594: note = R_VH-CH1/Q39K/S183E/CLD201/Sp34_VK-CH1/Q38K/S183K

SEQ ID NO: 5043 - protein, 1173 aa, synthetic construct
  REGION 1..1173: note R_VH-CH1/Q39K/S183E/CLD201/Sp34_VK-CH1/Q38E/S183K/41BBL
QVQLQQPGAELVKPGASVKMSCKASGYTFTSYNMHWVKKTPGRGLEWIGAIYPGNGDTSYNQKFKGKATLTADKSSSTAYMQLSSLTSEDSAVYYCARSTYYGGDWYFNVWGAGTTVTVSAASTKGPSVFPLAPSSKSTSGGTAALGCLVKDYFPEPVTVSWNSGALTSGVHTFPAVLQSSGLYSLESVVTVPSSSLGTQTYICNVNHKPSNTKVDKKVEPKSCTDWSPYADQSIKVRISLKSALGDKAYEWNDNEMYLFRSSVAYAMRQYFLKVKNQMILFGEEDVRVANLKPRISFNFFVTAPKNVSDIIPRTEVEKAIRMSRSRINDAFRLNDNSLEFLGIQPTLGPPNQPPVSTSTSPTRSMAPGAVHLPQPVSTRQAVVTQEPSLTVSPGGTVTLTCGSSTGAVTTSNYANWVQEKPGQAFRGLIGGTNKRAPGTPARFSGSLLGGKAALTLSGAQPEDEAEYYCALWYSNLWVFGGGTKLTVLSSASTKGPSVFPLAPSSKSTSGGTAALGCLVKDYFPEPVTVSWNSGALTSGVHTFPAVLQSSGLYSLKSVVTVPSSSLGTQTYICNVNHKPSNTKVDKKVEPKSCGGGSGGGGSREGPELSPDDPAGLLDLRQGMFAQLVAQNVLLIDGPLSWYSDPGLAGVSLTGGLSYKEDTKELVVAKAGVYYVFFQLELRRVVAGEGSGSVSLALHLQPLRSAAGAAALALTVDLPPASSEARNSAFGFQGRLLHLSAGQRLGVHLHTEARARHAWQLTQGATVLGLFRVTPEIPAGLPSPRSEGGGSGGGGSREGPELSPDDPAGLLDLRQGMFAQLVAQNVLLIDGPLSWYSDPGLAGVSLTGGLSYKEDTKELVVAKAGVYYVFFQLELRRVVAGEGSGSVSLALHLQPLRSAAGAAALALTVDLPPASSEARNSAFGFQGRLLHLSAGQRLGVHLHTEARARHAWQLTQGATVLGLFRVTPEIPAGLPSPRSEGGGSGGGGSREGPELSPDDPAGLLDLRQGMFAQLVAQNVLLIDGPLSWYSDPGLAGVSLTGGLSYKEDTKELVVAKAGVYYVFFQLELRRVVAGEGSGSVSLALHLQPLRSAAGAAALALTVDLPPASSEARNSAFGFQGRLLHLSAGQRLGVHLHTEARARHAWQLTQGATVLGLFRVTPEIPAGLPSPRSE

SEQ ID NO: 5044 - protein, 1173 aa, synthetic construct
  REGION 1..1173: note R_VH-CH1/Q39K/S183E/CLD201/Sp34_VK-CH1/Q38K/S183K/41BBL
QVQLQQPGAELVKPGASVKMSCKASGYTFTSYNMHWVKKTPGRGLEWIGAIYPGNGDTSYNQKFKGKATLTADKSSSTAYMQLSSLTSEDSAVYYCARSTYYGGDWYFNVWGAGTTVTVSAASTKGPSVFPLAPSSKSTSGGTAALGCLVKDYFPEPVTVSWNSGALTSGVHTFPAVLQSSGLYSLESVVTVPSSSLGTQTYICNVNHKPSNTKVDKKVEPKSCTDWSPYADQSIKVRISLKSALGDKAYEWNDNEMYLFRSSVAYAMRQYFLKVKNQMILFGEEDVRVANLKPRISFNFFVTAPKNVSDIIPRTEVEKAIRMSRSRINDAFRLNDNSLEFLGIQPTLGPPNQPPVSTSTSPTRSMAPGAVHLPQPVSTRQAVVTQEPSLTVSPGGTVTLTCGSSTGAVTTSNYANWVQKKPGQAFRGLIGGTNKRAPGTPARFSGSLLGGKAALTLSGAQPEDEAEYYCALWYSNLWVFGGGTKLTVLSSASTKGPSVFPLAPSSKSTSGGTAALGCLVKDYFPEPVTVSWNSGALTSGVHTFPAVLQSSGLYSLKSVVTVPSSSLGTQTYICNVNHKPSNTKVDKKVEPKSCGGGSGGGGSREGPELSPDDPAGLLDLRQGMFAQLVAQNVLLIDGPLSWYSDPGLAGVSLTGGLSYKEDTKELVVAKAGVYYVFFQLELRRVVAGEGSGSVSLALHLQPLRSAAGAAALALTVDLPPASSEARNSAFGFQGRLLHLSAGQRLGVHLHTEARARHAWQLTQGATVLGLFRVTPEIPAGLPSPRSEGGGSGGGGSREGPELSPDDPAGLLDLRQGMFAQLVAQNVLLIDGPLSWYSDPGLAGVSLTGGLSYKEDTKELVVAKAGVYYVFFQLELRRVVAGEGSGSVSLALHLQPLRSAAGAAALALTVDLPPASSEARNSAFGFQGRLLHLSAGQRLGVHLHTEARARHAWQLTQGATVLGLFRVTPEIPAGLPSPRSEGGGSGGGGSREGPELSPDDPAGLLDLRQGMFAQLVAQNVLLIDGPLSWYSDPGLAGVSLTGGLSYKEDTKELVVAKAGVYYVFFQLELRRVVAGEGSGSVSLALHLQPLRSAAGAAALALTVDLPPASSEARNSAFGFQGRLLHLSAGQRLGVHLHTEARARHAWQLTQGATVLGLFRVTPEIPAGLPSPRSE

SEQ ID NO: 5045 - protein, 440 aa, synthetic construct; identical to SEQ ID NO: 658
  REGION 1..440: note = Sp34_VK-CH1/knob/Q38E/S183K/PGLALA

SEQ ID NO: 5046 - protein, 440 aa, synthetic construct; identical to SEQ ID NO: 659
  REGION 1..440: note = Sp34_VK-CH1/knob/Q38K/S183K/PGLALA

SEQ ID NO: 5047 - protein, 1019 aa, synthetic construct
  REGION 1..1019: note = Sp34_VK-CH1/knob/Q38E/S183K/PGLALA/41BBL
QAVVTQEPSLTVSPGGTVTLTCGSSTGAVTTSNYANWVQEKPGQAFRGLIGGTNKRAPGTPARFSGSLLGGKAALTLSGAQPEDEAEYYCALWYSNLWVFGGGTKLTVLSSASTKGPSVFPLAPSSKSTSGGTAALGCLVKDYFPEPVTVSWNSGALTSGVHTFPAVLQSSGLYSLKSVVTVPSSSLGTQTYICNVNHKPSNTKVDKKVEPKSCDKTHTCPPCPAPEAAGGPSVFLFPPKPKDTLMISRTPEVTCVVVDVSHEDPEVKFNWYVDGVEVHNAKTKPREEQYNSTYRVVSVLTVLHQDWLNGKEYKCKVSNKALGAPIEKTISKAKGQPREPQVYTLPPCRDELTKNQVSLWCLVKGFYPSDIAVEWESNGQPENNYKTTPPVLDSDGSFFLYSKLTVDKSRWQQGNVFSCSVMHEALHNHYTQKSLSLSPGGGGSGGGGSREGPELSPDDPAGLLDLRQGMFAQLVAQNVLLIDGPLSWYSDPGLAGVSLTGGLSYKEDTKELVVAKAGVYYVFFQLELRRVVAGEGSGSVSLALHLQPLRSAAGAAALALTVDLPPASSEARNSAFGFQGRLLHLSAGQRLGVHLHTEARARHAWQLTQGATVLGLFRVTPEIPAGLPSPRSEGGGSGGGGSREGPELSPDDPAGLLDLRQGMFAQLVAQNVLLIDGPLSWYSDPGLAGVSLTGGLSYKEDTKELVVAKAGVYYVFFQLELRRVVAGEGSGSVSLALHLQPLRSAAGAAALALTVDLPPASSEARNSAFGFQGRLLHLSAGQRLGVHLHTEARARHAWQLTQGATVLGLFRVTPEIPAGLPSPRSEGGGSGGGGSREGPELSPDDPAGLLDLRQGMFAQLVAQNVLLIDGPLSWYSDPGLAGVSLTGGLSYKEDTKELVVAKAGVYYVFFQLELRRVVAGEGSGSVSLALHLQPLRSAAGAAALALTVDLPPASSEARNSAFGFQGRLLHLSAGQRLGVHLHTEARARHAWQLTQGATVLGLFRVTPEIPAGLPSPRSE

SEQ ID NO: 5048 - protein, 1019 aa, synthetic construct
  REGION 1..1019: note = Sp34_VK-CH1/knob/Q38K/S183K/PGLALA/41BBL
QAVVTQEPSLTVSPGGTVTLTCGSSTGAVTTSNYANWVQKKPGQAFRGLIGGTNKRAPGTPARFSGSLLGGKAALTLSGAQPEDEAEYYCALWYSNLWVFGGGTKLTVLSSASTKGPSVFPLAPSSKSTSGGTAALGCLVKDYFPEPVTVSWNSGALTSGVHTFPAVLQSSGLYSLKSVVTVPSSSLGTQTYICNVNHKPSNTKVDKKVEPKSCDKTHTCPPCPAPEAAGGPSVFLFPPKPKDTLMISRTPEVTCVVVDVSHEDPEVKFNWYVDGVEVHNAKTKPREEQYNSTYRVVSVLTVLHQDWLNGKEYKCKVSNKALGAPIEKTISKAKGQPREPQVYTLPPCRDELTKNQVSLWCLVKGFYPSDIAVEWESNGQPENNYKTTPPVLDSDGSFFLYSKLTVDKSRWQQGNVFSCSVMHEALHNHYTQKSLSLSPGGGGSGGGGSREGPELSPDDPAGLLDLRQGMFAQLVAQNVLLIDGPLSWYSDPGLAGVSLTGGLSYKEDTKELVVAKAGVYYVFFQLELRRVVAGEGSGSVSLALHLQPLRSAAGAAALALTVDLPPASSEARNSAFGFQGRLLHLSAGQRLGVHLHTEARARHAWQLTQGATVLGLFRVTPEIPAGLPSPRSEGGGSGGGGSREGPELSPDDPAGLLDLRQGMFAQLVAQNVLLIDGPLSWYSDPGLAGVSLTGGLSYKEDTKELVVAKAGVYYVFFQLELRRVVAGEGSGSVSLALHLQPLRSAAGAAALALTVDLPPASSEARNSAFGFQGRLLHLSAGQRLGVHLHTEARARHAWQLTQGATVLGLFRVTPEIPAGLPSPRSEGGGSGGGGSREGPELSPDDPAGLLDLRQGMFAQLVAQNVLLIDGPLSWYSDPGLAGVSLTGGLSYKEDTKELVVAKAGVYYVFFQLELRRVVAGEGSGSVSLALHLQPLRSAAGAAALALTVDLPPASSEARNSAFGFQGRLLHLSAGQRLGVHLHTEARARHAWQLTQGATVLGLFRVTPEIPAGLPSPRSE

SEQ ID NO: 5049 - protein, 1184 aa, synthetic construct
  REGION 1..1184: note = Tr_VH-CH1/N84S/Q39K/S183E/CLD201/hole/PGLALA/RF/41BBL
EVQLVESGGGLVQPGGSLRLSCAASGFNIKDTYIHWVRKAPGKGLEWVARIYPTNGYTRYADSVKGRFTISADTSKNTAYLQMSSLRAEDTAVYYCSRWGGDGFYAMDYWGQGTLVTVSSASTKGPSVFPLAPSSKSTSGGTAALGCLVKDYFPEPVTVSWNSGALTSGVHTFPAVLQSSGLYSLESVVTVPSSSLGTQTYICNVNHKPSNTKVDKKVEPKSCTDWSPYADQSIKVRISLKSALGDKAYEWNDNEMYLFRSSVAYAMRQYFLKVKNQMILFGEEDVRVANLKPRISFNFFVTAPKNVSDIIPRTEVEKAIRMSRSRINDAFRLNDNSLEFLGIQPTLGPPNQPPVSTSTSPTRSMAPGAVHLPQPVSTRDKTHTCPPCPAPEAAGGPSVFLFPPKPKDTLMISRTPEVTCVVVDVSHEDPEVKFNWYVDGVEVHNAKTKPREEQYNSTYRVVSVLTVLHQDWLNGKEYKCKVSNKALGAPIEKTISKAKGQPREPQVCTLPPSRDELTKNQVSLSCAVKGFYPSDIAVEWESNGQPENNYKTTPPVLDSDGSFFLVSKLTVDKSRWQQGNVFSCSVMHEALHNRFTQKSLSLSPGGGGSGGGGSREGPELSPDDPAGLLDLRQGMFAQLVAQNVLLIDGPLSWYSDPGLAGVSLTGGLSYKEDTKELVVAKAGVYYVFFQLELRRVVAGEGSGSVSLALHLQPLRSAAGAAALALTVDLPPASSEARNSAFGFQGRLLHLSAGQRLGVHLHTEARARHAWQLTQGATVLGLFRVTPEIPAGLPSPRSEGGGSGGGGSREGPELSPDDPAGLLDLRQGMFAQLVAQNVLLIDGPLSWYSDPGLAGVSLTGGLSYKEDTKELVVAKAGVYYVFFQLELRRVVAGEGSGSVSLALHLQPLRSAAGAAALALTVDLPPASSEARNSAFGFQGRLLHLSAGQRLGVHLHTEARARHAWQLTQGATVLGLFRVTPEIPAGLPSPRSEGGGSGGGGSREGPELSPDDPAGLLDLRQGMFAQLVAQNVLLIDGPLSWYSDPGLAGVSLTGGLSYKEDTKELVVAKAGVYYVFFQLELRRVVAGEGSGSVSLALHLQPLRSAAGAAALALTVDLPPASSEARNSAFGFQGRLLHLSAGQRLGVHLHTEARARHAWQLTQGATVLGLFRVTPEIPAGLPSPRSE

SEQ ID NO: 5050 - protein, 605 aa, synthetic construct; identical to SEQ ID NO: 4999
  REGION 1..605: note = Tr_VH-CH1/N84S/Q39K/S183E/CLD201/hole/PGLALA/RF

SEQ ID NO: 5051 - protein, 593 aa, synthetic construct
  REGION 1..593: note Tr_VH-CH1/N84S/Q39K/S183E/CLD201/Sp34_VK-CH1/Q38E/S183K
EVQLVESGGGLVQPGGSLRLSCAASGFNIKDTYIHWVRKAPGKGLEWVARIYPTNGYTRYADSVKGRFTISADTSKNTAYLQMSSLRAEDTAVYYCSRWGGDGFYAMDYWGQGTLVTVSSASTKGPSVFPLAPSSKSTSGGTAALGCLVKDYFPEPVTVSWNSGALTSGVHTFPAVLQSSGLYSLESVVTVPSSSLGTQTYICNVNHKPSNTKVDKKVEPKSCTDWSPYADQSIKVRISLKSALGDKAYEWNDNEMYLFRSSVAYAMRQYFLKVKNQMILFGEEDVRVANLKPRISFNFFVTAPKNVSDIIPRTEVEKAIRMSRSRINDAFRLNDNSLEFLGIQPTLGPPNQPPVSTSTSPTRSMAPGAVHLPQPVSTRQAVVTQEPSLTVSPGGTVTLTCGSSTGAVTTSNYANWVQEKPGQAFRGLIGGTNKRAPGTPARFSGSLLGGKAALTLSGAQPEDEAEYYCALWYSNLWVFGGGTKLTVLSSASTKGPSVFPLAPSSKSTSGGTAALGCLVKDYFPEPVTVSWNSGALTSGVHTFPAVLQSSGLYSLKSVVTVPSSSLGTQTYICNVNHKPSNTKVDKKVEPKSC

SEQ ID NO: 5052 - protein, 593 aa, synthetic construct
  REGION 1..593: note Tr_VH-CH1/N84S/Q39K/S183E/CLD201/Sp34_VK-CH1/Q38K/S183K
EVQLVESGGGLVQPGGSLRLSCAASGFNIKDTYIHWVRKAPGKGLEWVARIYPTNGYTRYADSVKGRFTISADTSKNTAYLQMSSLRAEDTAVYYCSRWGGDGFYAMDYWGQGTLVTVSSASTKGPSVFPLAPSSKSTSGGTAALGCLVKDYFPEPVTVSWNSGALTSGVHTFPAVLQSSGLYSLESVVTVPSSSLGTQTYICNVNHKPSNTKVDKKVEPKSCTDWSPYADQSIKVRISLKSALGDKAYEWNDNEMYLFRSSVAYAMRQYFLKVKNQMILFGEEDVRVANLKPRISFNFFVTAPKNVSDIIPRTEVEKAIRMSRSRINDAFRLNDNSLEFLGIQPTLGPPNQPPVSTSTSPTRSMAPGAVHLPQPVSTRQAVVTQEPSLTVSPGGTVTLTCGSSTGAVTTSNYANWVQKKPGQAFRGLIGGTNKRAPGTPARFSGSLLGGKAALTLSGAQPEDEAEYYCALWYSNLWVFGGGTKLTVLSSASTKGPSVFPLAPSSKSTSGGTAALGCLVKDYFPEPVTVSWNSGALTSGVHTFPAVLQSSGLYSLKSVVTVPSSSLGTQTYICNVNHKPSNTKVDKKVEPKSC

SEQ ID NO: 5053 - protein, 1172 aa, synthetic construct
  REGION 1..1172: note Tr_VH-CH1/N84S/Q39K/S183E/CLD201/Sp34_VK-CH1/Q38E/S183K/41B BL
EVQLVESGGGLVQPGGSLRLSCAASGFNIKDTYIHWVRKAPGKGLEWVARIYPTNGYTRYADSVKGRFTISADTSKNTAYLQMSSLRAEDTAVYYCSRWGGDGFYAMDYWGQGTLVTVSSASTKGPSVFPLAPSSKSTSGGTAALGCLVKDYFPEPVTVSWNSGALTSGVHTFPAVLQSSGLYSLESVVTVPSSSLGTQTYICNVNHKPSNTKVDKKVEPKSCTDWSPYADQSIKVRISLKSALGDKAYEWNDNEMYLFRSSVAYAMRQYFLKVKNQMILFGEEDVRVANLKPRISFNFFVTAPKNVSDIIPRTEVEKAIRMSRSRINDAFRLNDNSLEFLGIQPTLGPPNQPPVSTSTSPTRSMAPGAVHLPQPVSTRQAVVTQEPSLTVSPGGTVTLTCGSSTGAVTTSNYANWVQEKPGQAFRGLIGGTNKRAPGTPARFSGSLLGGKAALTLSGAQPEDEAEYYCALWYSNLWVFGGGTKLTVLSSASTKGPSVFPLAPSSKSTSGGTAALGCLVKDYFPEPVTVSWNSGALTSGVHTFPAVLQSSGLYSLKSVVTVPSSSLGTQTYICNVNHKPSNTKVDKKVEPKSCGGGSGGGGSREGPELSPDDPAGLLDLRQGMFAQLVAQNVLLIDGPLSWYSDPGLAGVSLTGGLSYKEDTKELVVAKAGVYYVFFQLELRRVVAGEGSGSVSLALHLQPLRSAAGAAALALTVDLPPASSEARNSAFGFQGRLLHLSAGQRLGVHLHTEARARHAWQLTQGATVLGLFRVTPEIPAGLPSPRSEGGGSGGGGSREGPELSPDDPAGLLDLRQGMFAQLVAQNVLLIDGPLSWYSDPGLAGVSLTGGLSYKEDTKELVVAKAGVYYVFFQLELRRVVAGEGSGSVSLALHLQPLRSAAGAAALALTVDLPPASSEARNSAFGFQGRLLHLSAGQRLGVHLHTEARARHAWQLTQGATVLGLFRVTPEIPAGLPSPRSEGGGSGGGGSREGPELSPDDPAGLLDLRQGMFAQLVAQNVLLIDGPLSWYSDPGLAGVSLTGGLSYKEDTKELVVAKAGVYYVFFQLELRRVVAGEGSGSVSLALHLQPLRSAAGAAALALTVDLPPASSEARNSAFGFQGRLLHLSAGQRLGVHLHTEARARHAWQLTQGATVLGLFRVTPEIPAGLPSPRSE

SEQ ID NO: 5054 - protein, 1172 aa, synthetic construct
  REGION 1..1172: note Tr_VH-CH1/N84S/Q39K/S183E/CLD201/Sp34_VK-CH1/Q38K/S183K/41B BL
EVQLVESGGGLVQPGGSLRLSCAASGFNIKDTYIHWVRKAPGKGLEWVARIYPTNGYTRYADSVKGRFTISADTSKNTAYLQMSSLRAEDTAVYYCSRWGGDGFYAMDYWGQGTLVTVSSASTKGPSVFPLAPSSKSTSGGTAALGCLVKDYFPEPVTVSWNSGALTSGVHTFPAVLQSSGLYSLESVVTVPSSSLGTQTYICNVNHKPSNTKVDKKVEPKSCTDWSPYADQSIKVRISLKSALGDKAYEWNDNEMYLFRSSVAYAMRQYFLKVKNQMILFGEEDVRVANLKPRISFNFFVTAPKNVSDIIPRTEVEKAIRMSRSRINDAFRLNDNSLEFLGIQPTLGPPNQPPVSTSTSPTRSMAPGAVHLPQPVSTRQAVVTQEPSLTVSPGGTVTLTCGSSTGAVTTSNYANWVQKKPGQAFRGLIGGTNKRAPGTPARFSGSLLGGKAALTLSGAQPEDEAEYYCALWYSNLWVFGGGTKLTVLSSASTKGPSVFPLAPSSKSTSGGTAALGCLVKDYFPEPVTVSWNSGALTSGVHTFPAVLQSSGLYSLKSVVTVPSSSLGTQTYICNVNHKPSNTKVDKKVEPKSCGGGSGGGGSREGPELSPDDPAGLLDLRQGMFAQLVAQNVLLIDGPLSWYSDPGLAGVSLTGGLSYKEDTKELVVAKAGVYYVFFQLELRRVVAGEGSGSVSLALHLQPLRSAAGAAALALTVDLPPASSEARNSAFGFQGRLLHLSAGQRLGVHLHTEARARHAWQLTQGATVLGLFRVTPEIPAGLPSPRSEGGGSGGGGSREGPELSPDDPAGLLDLRQGMFAQLVAQNVLLIDGPLSWYSDPGLAGVSLTGGLSYKEDTKELVVAKAGVYYVFFQLELRRVVAGEGSGSVSLALHLQPLRSAAGAAALALTVDLPPASSEARNSAFGFQGRLLHLSAGQRLGVHLHTEARARHAWQLTQGATVLGLFRVTPEIPAGLPSPRSEGGGSGGGGSREGPELSPDDPAGLLDLRQGMFAQLVAQNVLLIDGPLSWYSDPGLAGVSLTGGLSYKEDTKELVVAKAGVYYVFFQLELRRVVAGEGSGSVSLALHLQPLRSAAGAAALALTVDLPPASSEARNSAFGFQGRLLHLSAGQRLGVHLHTEARARHAWQLTQGATVLGLFRVTPEIPAGLPSPRSE

SEQ ID NO: 5055 - protein, 1185 aa, synthetic construct
  REGION 1..1185: note = Cg_VH-CH1/Q39K/S183E/CLD201/hole/PGLALA/RF/41BBL
QVQLVQSGAEVKKPGASVKVSCKASGYTFTEFGMNWVRKAPGQGLEWMGWINTKTGEATYVEEFKGRVTFTTDTSTSTAYMELRSLRSDDTAVYYCARWDFAYYVEAMDYWGQGTTVTVSSASTKGPSVFPLAPSSKSTSGGTAALGCLVKDYFPEPVTVSWNSGALTSGVHTFPAVLQSSGLYSLESVVTVPSSSLGTQTYICNVNHKPSNTKVDKKVEPKSCTDWSPYADQSIKVRISLKSALGDKAYEWNDNEMYLFRSSVAYAMRQYFLKVKNQMILFGEEDVRVANLKPRISFNFFVTAPKNVSDIIPRTEVEKAIRMSRSRINDAFRLNDNSLEFLGIQPTLGPPNQPPVSTSTSPTRSMAPGAVHLPQPVSTRDKTHTCPPCPAPEAAGGPSVFLFPPKPKDTLMISRTPEVTCVVVDVSHEDPEVKFNWYVDGVEVHNAKTKPREEQYNSTYRVVSVLTVLHQDWLNGKEYKCKVSNKALGAPIEKTISKAKGQPREPQVCTLPPSRDELTKNQVSLSCAVKGFYPSDIAVEWESNGQPENNYKTTPPVLDSDGSFFLVSKLTVDKSRWQQGNVFSCSVMHEALHNRFTQKSLSLSPGGGGSGGGGSREGPELSPDDPAGLLDLRQGMFAQLVAQNVLLIDGPLSWYSDPGLAGVSLTGGLSYKEDTKELVVAKAGVYYVFFQLELRRVVAGEGSGSVSLALHLQPLRSAAGAAALALTVDLPPASSEARNSAFGFQGRLLHLSAGQRLGVHLHTEARARHAWQLTQGATVLGLFRVTPEIPAGLPSPRSEGGGSGGGGSREGPELSPDDPAGLLDLRQGMFAQLVAQNVLLIDGPLSWYSDPGLAGVSLTGGLSYKEDTKELVVAKAGVYYVFFQLELRRVVAGEGSGSVSLALHLQPLRSAAGAAALALTVDLPPASSEARNSAFGFQGRLLHLSAGQRLGVHLHTEARARHAWQLTQGATVLGLFRVTPEIPAGLPSPRSEGGGSGGGGSREGPELSPDDPAGLLDLRQGMFAQLVAQNVLLIDGPLSWYSDPGLAGVSLTGGLSYKEDTKELVVAKAGVYYVFFQLELRRVVAGEGSGSVSLALHLQPLRSAAGAAALALTVDLPPASSEARNSAFGFQGRLLHLSAGQRLGVHLHTEARARHAWQLTQGATVLGLFRVTPEIPAGLPSPRSE

SEQ ID NO: 5056 - protein, 606 aa, synthetic construct
  REGION 1..606: note = Cg_VH-CH1/Q39K/S183E/CLD201/hole/PGLALA/RF
QVQLVQSGAEVKKPGASVKVSCKASGYTFTEFGMNWVRKAPGQGLEWMGWINTKTGEATYVEEFKGRVTFTTDTSTSTAYMELRSLRSDDTAVYYCARWDFAYYVEAMDYWGQGTTVTVSSASTKGPSVFPLAPSSKSTSGGTAALGCLVKDYFPEPVTVSWNSGALTSGVHTFPAVLQSSGLYSLESVVTVPSSSLGTQTYICNVNHKPSNTKVDKKVEPKSCTDWSPYADQSIKVRISLKSALGDKAYEWNDNEMYLFRSSVAYAMRQYFLKVKNQMILFGEEDVRVANLKPRISFNFFVTAPKNVSDIIPRTEVEKAIRMSRSRINDAFRLNDNSLEFLGIQPTLGPPNQPPVSTSTSPTRSMAPGAVHLPQPVSTRDKTHTCPPCPAPEAAGGPSVFLFPPKPKDTLMISRTPEVTCVVVDVSHEDPEVKFNWYVDGVEVHNAKTKPREEQYNSTYRVVSVLTVLHQDWLNGKEYKCKVSNKALGAPIEKTISKAKGQPREPQVCTLPPSRDELTKNQVSLSCAVKGFYPSDIAVEWESNGQPENNYKTTPPVLDSDGSFFLVSKLTVDKSRWQQGNVFSCSVMHEALHNRFTQKSLSLSPG

SEQ ID NO: 5057 - protein, 594 aa, synthetic construct
  REGION 1..594: note = Cg_VH-CH1/Q39K/S183E/CLD201/Sp34_VK-CH1/Q38E/S183K
QVQLVQSGAEVKKPGASVKVSCKASGYTFTEFGMNWVRKAPGQGLEWMGWINTKTGEATYVEEFKGRVTFTTDTSTSTAYMELRSLRSDDTAVYYCARWDFAYYVEAMDYWGQGTTVTVSSASTKGPSVFPLAPSSKSTSGGTAALGCLVKDYFPEPVTVSWNSGALTSGVHTFPAVLQSSGLYSLESVVTVPSSSLGTQTYICNVNHKPSNTKVDKKVEPKSCTDWSPYADQSIKVRISLKSALGDKAYEWNDNEMYLFRSSVAYAMRQYFLKVKNQMILFGEEDVRVANLKPRISFNFFVTAPKNVSDIIPRTEVEKAIRMSRSRINDAFRLNDNSLEFLGIQPTLGPPNQPPVSTSTSPTRSMAPGAVHLPQPVSTRQAVVTQEPSLTVSPGGTVTLTCGSSTGAVTTSNYANWVQEKPGQAFRGLIGGTNKRAPGTPARFSGSLLGGKAALTLSGAQPEDEAEYYCALWYSNLWVFGGGTKLTVLSSASTKGPSVFPLAPSSKSTSGGTAALGCLVKDYFPEPVTVSWNSGALTSGVHTFPAVLQSSGLYSLKSVVTVPSSSLGTQTYICNVNHKPSNTKVDKKVEPKSC

SEQ ID NO: 5058 - protein, 594 aa, synthetic construct
  REGION 1..594: note = Cg_VH-CH1/Q39K/S183E/CLD201/Sp34_VK-CH1/Q38K/S183K
QVQLVQSGAEVKKPGASVKVSCKASGYTFTEFGMNWVRKAPGQGLEWMGWINTKTGEATYVEEFKGRVTFTTDTSTSTAYMELRSLRSDDTAVYYCARWDFAYYVEAMDYWGQGTTVTVSSASTKGPSVFPLAPSSKSTSGGTAALGCLVKDYFPEPVTVSWNSGALTSGVHTFPAVLQSSGLYSLESVVTVPSSSLGTQTYICNVNHKPSNTKVDKKVEPKSCTDWSPYADQSIKVRISLKSALGDKAYEWNDNEMYLFRSSVAYAMRQYFLKVKNQMILFGEEDVRVANLKPRISFNFFVTAPKNVSDIIPRTEVEKAIRMSRSRINDAFRLNDNSLEFLGIQPTLGPPNQPPVSTSTSPTRSMAPGAVHLPQPVSTRQAVVTQEPSLTVSPGGTVTLTCGSSTGAVTTSNYANWVQKKPGQAFRGLIGGTNKRAPGTPARFSGSLLGGKAALTLSGAQPEDEAEYYCALWYSNLWVFGGGTKLTVLSSASTKGPSVFPLAPSSKSTSGGTAALGCLVKDYFPEPVTVSWNSGALTSGVHTFPAVLQSSGLYSLKSVVTVPSSSLGTQTYICNVNHKPSNTKVDKKVEPKSC

SEQ ID NO: 5059 - protein, 1173 aa, synthetic construct
  REGION 1..1173: note Cg_VH-CH1/Q39K/S183E/CLD201/Sp34_VK-CH1/Q38E/S183K/41BBL
QVQLVQSGAEVKKPGASVKVSCKASGYTFTEFGMNWVRKAPGQGLEWMGWINTKTGEATYVEEFKGRVTFTTDTSTSTAYMELRSLRSDDTAVYYCARWDFAYYVEAMDYWGQGTTVTVSSASTKGPSVFPLAPSSKSTSGGTAALGCLVKDYFPEPVTVSWNSGALTSGVHTFPAVLQSSGLYSLESVVTVPSSSLGTQTYICNVNHKPSNTKVDKKVEPKSCTDWSPYADQSIKVRISLKSALGDKAYEWNDNEMYLFRSSVAYAMRQYFLKVKNQMILFGEEDVRVANLKPRISFNFFVTAPKNVSDIIPRTEVEKAIRMSRSRINDAFRLNDNSLEFLGIQPTLGPPNQPPVSTSTSPTRSMAPGAVHLPQPVSTRQAVVTQEPSLTVSPGGTVTLTCGSSTGAVTTSNYANWVQEKPGQAFRGLIGGTNKRAPGTPARFSGSLLGGKAALTLSGAQPEDEAEYYCALWYSNLWVFGGGTKLTVLSSASTKGPSVFPLAPSSKSTSGGTAALGCLVKDYFPEPVTVSWNSGALTSGVHTFPAVLQSSGLYSLKSVVTVPSSSLGTQTYICNVNHKPSNTKVDKKVEPKSCGGGSGGGGSREGPELSPDDPAGLLDLRQGMFAQLVAQNVLLIDGPLSWYSDPGLAGVSLTGGLSYKEDTKELVVAKAGVYYVFFQLELRRVVAGEGSGSVSLALHLQPLRSAAGAAALALTVDLPPASSEARNSAFGFQGRLLHLSAGQRLGVHLHTEARARHAWQLTQGATVLGLFRVTPEIPAGLPSPRSEGGGSGGGGSREGPELSPDDPAGLLDLRQGMFAQLVAQNVLLIDGPLSWYSDPGLAGVSLTGGLSYKEDTKELVVAKAGVYYVFFQLELRRVVAGEGSGSVSLALHLQPLRSAAGAAALALTVDLPPASSEARNSAFGFQGRLLHLSAGQRLGVHLHTEARARHAWQLTQGATVLGLFRVTPEIPAGLPSPRSEGGGSGGGGSREGPELSPDDPAGLLDLRQGMFAQLVAQNVLLIDGPLSWYSDPGLAGVSLTGGLSYKEDTKELVVAKAGVYYVFFQLELRRVVAGEGSGSVSLALHLQPLRSAAGAAALALTVDLPPASSEARNSAFGFQGRLLHLSAGQRLGVHLHTEARARHAWQLTQGATVLGLFRVTPEIPAGLPSPRSE

SEQ ID NO: 5060 - protein, 1173 aa, synthetic construct
  REGION 1..1173: note Cg_VH-CH1/Q39K/S183E/CLD201/Sp34_VK-CH1/Q38K/S183K/41BBL
QVQLVQSGAEVKKPGASVKVSCKASGYTFTEFGMNWVRKAPGQGLEWMGWINTKTGEATYVEEFKGRVTFTTDTSTSTAYMELRSLRSDDTAVYYCARWDFAYYVEAMDYWGQGTTVTVSSASTKGPSVFPLAPSSKSTSGGTAALGCLVKDYFPEPVTVSWNSGALTSGVHTFPAVLQSSGLYSLESVVTVPSSSLGTQTYICNVNHKPSNTKVDKKVEPKSCTDWSPYADQSIKVRISLKSALGDKAYEWNDNEMYLFRSSVAYAMRQYFLKVKNQMILFGEEDVRVANLKPRISFNFFVTAPKNVSDIIPRTEVEKAIRMSRSRINDAFRLNDNSLEFLGIQPTLGPPNQPPVSTSTSPTRSMAPGAVHLPQPVSTRQAVVTQEPSLTVSPGGTVTLTCGSSTGAVTTSNYANWVQKKPGQAFRGLIGGTNKRAPGTPARFSGSLLGGKAALTLSGAQPEDEAEYYCALWYSNLWVFGGGTKLTVLSSASTKGPSVFPLAPSSKSTSGGTAALGCLVKDYFPEPVTVSWNSGALTSGVHTFPAVLQSSGLYSLKSVVTVPSSSLGTQTYICNVNHKPSNTKVDKKVEPKSCGGGSGGGGSREGPELSPDDPAGLLDLRQGMFAQLVAQNVLLIDGPLSWYSDPGLAGVSLTGGLSYKEDTKELVVAKAGVYYVFFQLELRRVVAGEGSGSVSLALHLQPLRSAAGAAALALTVDLPPASSEARNSAFGFQGRLLHLSAGQRLGVHLHTEARARHAWQLTQGATVLGLFRVTPEIPAGLPSPRSEGGGSGGGGSREGPELSPDDPAGLLDLRQGMFAQLVAQNVLLIDGPLSWYSDPGLAGVSLTGGLSYKEDTKELVVAKAGVYYVFFQLELRRVVAGEGSGSVSLALHLQPLRSAAGAAALALTVDLPPASSEARNSAFGFQGRLLHLSAGQRLGVHLHTEARARHAWQLTQGATVLGLFRVTPEIPAGLPSPRSEGGGSGGGGSREGPELSPDDPAGLLDLRQGMFAQLVAQNVLLIDGPLSWYSDPGLAGVSLTGGLSYKEDTKELVVAKAGVYYVFFQLELRRVVAGEGSGSVSLALHLQPLRSAAGAAALALTVDLPPASSEARNSAFGFQGRLLHLSAGQRLGVHLHTEARARHAWQLTQGATVLGLFRVTPEIPAGLPSPRSE

SEQ ID NO: 5061 - protein, 213 aa, synthetic construct; identical to SEQ ID NO: 735
  REGION 1..213: note = R_VK-CK/Q38E/V133K

SEQ ID NO: 5062 - protein, 232 aa, synthetic construct; identical to SEQ ID NO: 698
  REGION 1..232: note = Sp34_VH-CK/N84S/Q39K/V133E

SEQ ID NO: 5063 - protein, 232 aa, synthetic construct; identical to SEQ ID NO: 699
  REGION 1..232: note = Sp34_VH-CK/N84S/Q39E/V133E

SEQ ID NO: 5064 - protein, 811 aa, synthetic construct
  REGION 1..811: note = Sp34_VH-CK/N84S/Q39K/V133E/41BBL
EVQLLESGGGLVQPGGSLRLSCAASGFTFSTYAMNWVRKAPGKGLEWVSRIRSKYNNYATYYADSVKGRFTISRDDSKNTLYLQMSSLRAEDTAVYYCVRHGNFGNSYVSWFAYWGQGTLVTVSSASVAAPSVFIFPPSDEQLKSGTASVECLLNNFYPREAKVQWKVDNALQSGNSQESVTEQDSKDSTYSLSSTLTLSKADYEKHKVYACEVTHQGLSSPVTKSFNRGECGGGSGGGGSREGPELSPDDPAGLLDLRQGMFAQLVAQNVLLIDGPLSWYSDPGLAGVSLTGGLSYKEDTKELVVAKAGVYYVFFQLELRRVVAGEGSGSVSLALHLQPLRSAAGAAALALTVDLPPASSEARNSAFGFQGRLLHLSAGQRLGVHLHTEARARHAWQLTQGATVLGLFRVTPEIPAGLPSPRSEGGGSGGGGSREGPELSPDDPAGLLDLRQGMFAQLVAQNVLLIDGPLSWYSDPGLAGVSLTGGLSYKEDTKELVVAKAGVYYVFFQLELRRVVAGEGSGSVSLALHLQPLRSAAGAAALALTVDLPPASSEARNSAFGFQGRLLHLSAGQRLGVHLHTEARARHAWQLTQGATVLGLFRVTPEIPAGLPSPRSEGGGSGGGGSREGPELSPDDPAGLLDLRQGMFAQLVAQNVLLIDGPLSWYSDPGLAGVSLTGGLSYKEDTKELVVAKAGVYYVFFQLELRRVVAGEGSGSVSLALHLQPLRSAAGAAALALTVDLPPASSEARNSAFGFQGRLLHLSAGQRLGVHLHTEARARHAWQLTQGATVLGLFRVTPEIPAGLPSPRSE

SEQ ID NO: 5065 - protein, 811 aa, synthetic construct
  REGION 1..811: note = Sp34_VH-CK/N84S/Q39E/V133E/41BBL
EVQLLESGGGLVQPGGSLRLSCAASGFTFSTYAMNWVREAPGKGLEWVSRIRSKYNNYATYYADSVKGRFTISRDDSKNTLYLQMSSLRAEDTAVYYCVRHGNFGNSYVSWFAYWGQGTLVTVSSASVAAPSVFIFPPSDEQLKSGTASVECLLNNFYPREAKVQWKVDNALQSGNSQESVTEQDSKDSTYSLSSTLTLSKADYEKHKVYACEVTHQGLSSPVTKSFNRGECGGGSGGGGSREGPELSPDDPAGLLDLRQGMFAQLVAQNVLLIDGPLSWYSDPGLAGVSLTGGLSYKEDTKELVVAKAGVYYVFFQLELRRVVAGEGSGSVSLALHLQPLRSAAGAAALALTVDLPPASSEARNSAFGFQGRLLHLSAGQRLGVHLHTEARARHAWQLTQGATVLGLFRVTPEIPAGLPSPRSEGGGSGGGGSREGPELSPDDPAGLLDLRQGMFAQLVAQNVLLIDGPLSWYSDPGLAGVSLTGGLSYKEDTKELVVAKAGVYYVFFQLELRRVVAGEGSGSVSLALHLQPLRSAAGAAALALTVDLPPASSEARNSAFGFQGRLLHLSAGQRLGVHLHTEARARHAWQLTQGATVLGLFRVTPEIPAGLPSPRSEGGGSGGGGSREGPELSPDDPAGLLDLRQGMFAQLVAQNVLLIDGPLSWYSDPGLAGVSLTGGLSYKEDTKELVVAKAGVYYVFFQLELRRVVAGEGSGSVSLALHLQPLRSAAGAAALALTVDLPPASSEARNSAFGFQGRLLHLSAGQRLGVHLHTEARARHAWQLTQGATVLGLFRVTPEIPAGLPSPRSE

SEQ ID NO: 5066 - protein, 214 aa, synthetic construct; identical to SEQ ID NO: 5015
  REGION 1..214: note = Tr_VK-CK/Q38E/V133K

SEQ ID NO: 5067 - protein, 215 aa, synthetic construct
  REGION 1..215: note = Cg_VK-CK/Q38E/V133K
DIQMTQSPSSLSASVGDRVTITCKASAAVGTYVAWYQEKPGKAPKLLIYSASYRKRGVPSRFSGSGSGTDFTLTISSLQPEDFATYYCHQYYTYPLFTFGQGTKLEIKRTVAAPSVFIFPPSDEQLKSGTASVKCLLNNFYPREAKVQWKVDNALQSGNSQESVTEQDSKDSTYSLSSTLTLSKADYEKHKVYACEVTHQGLSSPVTKSFNRGEC

SEQ ID NO: 5068 - protein, 221 aa, synthetic construct; identical to SEQ ID NO: 706
  REGION 1..221: note = Fc6/knob/PGLALA

SEQ ID NO: 5069 - protein, 800 aa, synthetic construct
  REGION 1..800: note = Fc6/knob/PGLALA/41BBL
CPPCPAPEAAGGPSVFLFPPKPKDTLMISRTPEVTCVVVDVSHEDPEVKFNWYVDGVEVHNAKTKPREEQYNSTYRVVSVLTVLHQDWLNGKEYKCKVSNKALGAPIEKTISKAKGQPREPQVYTLPPCRDELTKNQVSLWCLVKGFYPSDIAVEWESNGQPENNYKTTPPVLDSDGSFFLYSKLTVDKSRWQQGNVFSCSVMHEALHNHYTQKSLSLSPGGGGSGGGGSREGPELSPDDPAGLLDLRQGMFAQLVAQNVLLIDGPLSWYSDPGLAGVSLTGGLSYKEDTKELVVAKAGVYYVFFQLELRRVVAGEGSGSVSLALHLQPLRSAAGAAALALTVDLPPASSEARNSAFGFQGRLLHLSAGQRLGVHLHTEARARHAWQLTQGATVLGLFRVTPEIPAGLPSPRSEGGGSGGGGSREGPELSPDDPAGLLDLRQGMFAQLVAQNVLLIDGPLSWYSDPGLAGVSLTGGLSYKEDTKELVVAKAGVYYVFFQLELRRVVAGEGSGSVSLALHLQPLRSAAGAAALALTVDLPPASSEARNSAFGFQGRLLHLSAGQRLGVHLHTEARARHAWQLTQGATVLGLFRVTPEIPAGLPSPRSEGGGSGGGGSREGPELSPDDPAGLLDLRQGMFAQLVAQNVLLIDGPLSWYSDPGLAGVSLTGGLSYKEDTKELVVAKAGVYYVFFQLELRRVVAGEGSGSVSLALHLQPLRSAAGAAALALTVDLPPASSEARNSAFGFQGRLLHLSAGQRLGVHLHTEARARHAWQLTQGATVLGLFRVTPEIPAGLPSPRSE

SEQ ID NO: 5070 - protein, 500 aa, synthetic construct
  REGION 1..500: note = SIRPA/CLD201/hole/RF
EEELQVIQPDKSVSVAAGESAILHCTVTSLIPVGPIQWFRGAGPARELIYNQKEGHFPRVTTVSESTKRENMDFSISISNITPADAGTYYCVKFRKGSPDTEFKSGAGTELSVRAKPSTDWSPYADQSIKVRISLKSALGDKAYEWNDNEMYLFRSSVAYAMRQYFLKVKNQMILFGEEDVRVANLKPRISFNFFVTAPKNVSDIIPRTEVEKAIRMSRSRINDAFRLNDNSLEFLGIQPTLGPPNQPPVSTSTSPTRSMAPGAVHLPQPVSTRDKTHTCPPCPAPELLGGPSVFLFPPKPKDTLMISRTPEVTCVVVDVSHEDPEVKFNWYVDGVEVHNAKTKPREEQYNSTYRVVSVLTVLHQDWLNGKEYKCKVSNKALPAPIEKTISKAKGQPREPQVCTLPPSRDELTKNQVSLSCAVKGFYPSDIAVEWESNGQPENNYKTTPPVLDSDGSFFLVSKLTVDKSRWQQGNVFSCSVMHEALHNRFTQKSLSLSPG

SEQ ID NO: 5071 - protein, 523 aa, synthetic construct
  REGION 1..523: note = SIRPA201/CLD201/hole/RF
EEELQVIQPDKSVSVAAGESAILHCTVTSLIPVGPIQWFRGAGPARELIYNQKEGHFPRVTTVSESTKRENMDFSISISNITPADAGTYYCVKFRKGSPDTEFKSGAGTELSVRAKPSTSTSPTRSMAPGAVHLPQPVSTRTDWSPYADQSIKVRISLKSALGDKAYEWNDNEMYLFRSSVAYAMRQYFLKVKNQMILFGEEDVRVANLKPRISFNFFVTAPKNVSDIIPRTEVEKAIRMSRSRINDAFRLNDNSLEFLGIQPTLGPPNQPPVSTSTSPTRSMAPGAVHLPQPVSTRDKTHTCPPCPAPELLGGPSVFLFPPKPKDTLMISRTPEVTCVVVDVSHEDPEVKFNWYVDGVEVHNAKTKPREEQYNSTYRVVSVLTVLHQDWLNGKEYKCKVSNKALPAPIEKTISKAKGQPREPQVCTLPPSRDELTKNQVSLSCAVKGFYPSDIAVEWESNGQPENNYKTTPPVLDSDGSFFLVSKLTVDKSRWQQGNVFSCSVMHEALHNRFTQKSLSLSPG

SEQ ID NO: 5072 - protein, 450 aa, synthetic construct; identical to SEQ ID NO: 4734
  REGION 1..450: note = R_VH-CH1/knob

SEQ ID NO: 5073 - protein, 451 aa, synthetic construct; identical to SEQ ID NO: 644
  REGION 1..451: note = Da_VH-CH1/N84S/knob

SEQ ID NO: 5074 - protein, 449 aa, synthetic construct
  REGION 1..449: note = Tr_VH-CH1/N84S/knob
EVQLVESGGGLVQPGGSLRLSCAASGFNIKDTYIHWVRQAPGKGLEWVARIYPTNGYTRYADSVKGRFTISADTSKNTAYLQMSSLRAEDTAVYYCSRWGGDGFYAMDYWGQGTLVTVSSASTKGPSVFPLAPSSKSTSGGTAALGCLVKDYFPEPVTVSWNSGALTSGVHTFPAVLQSSGLYSLSSVVTVPSSSLGTQTYICNVNHKPSNTKVDKKVEPKSCDKTHTCPPCPAPELLGGPSVFLFPPKPKDTLMISRTPEVTCVVVDVSHEDPEVKFNWYVDGVEVHNAKTKPREEQYNSTYRVVSVLTVLHQDWLNGKEYKCKVSNKALPAPIEKTISKAKGQPREPQVYTLPPCRDELTKNQVSLWCLVKGFYPSDIAVEWESNGQPENNYKTTPPVLDSDGSFFLYSKLTVDKSRWQQGNVFSCSVMHEALHNHYTQKSLSLSPG

SEQ ID NO: 5075 - protein, 448 aa, synthetic construct
  REGION 1..448: note = Ce_VH-CH1/N84S/knob
QVQLKQSGPGLVQPSQSLSITCTVSGFSLTNYGVHWVRQSPGKGLEWLGVIWSGGNTDYNTPFTSRLSINKDNSKSQVFFKMSSLQSNDTAIYYCARALTYYDYEFAYWGQGTLVTVSAASTKGPSVFPLAPSSKSTSGGTAALGCLVKDYFPEPVTVSWNSGALTSGVHTFPAVLQSSGLYSLSSVVTVPSSSLGTQTYICNVNHKPSNTKVDKKVEPKSCDKTHTCPPCPAPELLGGPSVFLFPPKPKDTLMISRTPEVTCVVVDVSHEDPEVKFNWYVDGVEVHNAKTKPREEQYNSTYRVVSVLTVLHQDWLNGKEYKCKVSNKALPAPIEKTISKAKGQPREPQVYTLPPCRDELTKNQVSLWCLVKGFYPSDIAVEWESNGQPENNYKTTPPVLDSDGSFFLYSKLTVDKSRWQQGNVFSCSVMHEALHNHYTQKSLSLSPG

SEQ ID NO: 5076 - protein, 450 aa, synthetic construct
  REGION 1..450: note = Cg_VH-CH1/N84S/knob
QVQLVQSGAEVKKPGASVKVSCKASGYTFTEFGMNWVRQAPGQGLEWMGWINTKTGEATYVEEFKGRVTFTTDTSTSTAYMELRSLRSDDTAVYYCARWDFAYYVEAMDYWGQGTTVTVSSASTKGPSVFPLAPSSKSTSGGTAALGCLVKDYFPEPVTVSWNSGALTSGVHTFPAVLQSSGLYSLSSVVTVPSSSLGTQTYICNVNHKPSNTKVDKKVEPKSCDKTHTCPPCPAPELLGGPSVFLFPPKPKDTLMISRTPEVTCVVVDVSHEDPEVKFNWYVDGVEVHNAKTKPREEQYNSTYRVVSVLTVLHQDWLNGKEYKCKVSNKALPAPIEKTISKAKGQPREPQVYTLPPCRDELTKNQVSLWCLVKGFYPSDIAVEWESNGQPENNYKTTPPVLDSDGSFFLYSKLTVDKSRWQQGNVFSCSVMHEALHNHYTQKSLSLSPG

SEQ ID NO: 5077 - protein, 977 aa, synthetic construct
  REGION 1..977: note = SIRPA/CLD201/hole/RF/CD40L
EEELQVIQPDKSVSVAAGESAILHCTVTSLIPVGPIQWFRGAGPARELIYNQKEGHFPRVTTVSESTKRENMDFSISISNITPADAGTYYCVKFRKGSPDTEFKSGAGTELSVRAKPSTDWSPYADQSIKVRISLKSALGDKAYEWNDNEMYLFRSSVAYAMRQYFLKVKNQMILFGEEDVRVANLKPRISFNFFVTAPKNVSDIIPRTEVEKAIRMSRSRINDAFRLNDNSLEFLGIQPTLGPPNQPPVSTSTSPTRSMAPGAVHLPQPVSTRDKTHTCPPCPAPELLGGPSVFLFPPKPKDTLMISRTPEVTCVVVDVSHEDPEVKFNWYVDGVEVHNAKTKPREEQYNSTYRVVSVLTVLHQDWLNGKEYKCKVSNKALPAPIEKTISKAKGQPREPQVCTLPPSRDELTKNQVSLSCAVKGFYPSDIAVEWESNGQPENNYKTTPPVLDSDGSFFLVSKLTVDKSRWQQGNVFSCSVMHEALHNRFTQKSLSLSPGGGGSGGGGSEMQKGDQNPQIAAHVISEASSKTTSVLQWAEKGYYTMSNNLVTLENGKQLTVKRQGLYYIYAQVTFCSNREASSQAPFIASLCLKSPGRFERILLRAANTHSSAKPCGQQSIHLGGVFELQPGASVFVNVTDPSQVSHGTGFTSFGLLKLGGGSGGGGSEMQKGDQNPQIAAHVISEASSKTTSVLQWAEKGYYTMSNNLVTLENGKQLTVKRQGLYYIYAQVTFCSNREASSQAPFIASLCLKSPGRFERILLRAANTHSSAKPCGQQSIHLGGVFELQPGASVFVNVTDPSQVSHGTGFTSFGLLKLGGGSGGGGSEMQKGDQNPQIAAHVISEASSKTTSVLQWAEKGYYTMSNNLVTLENGKQLTVKRQGLYYIYAQVTFCSNREASSQAPFIASLCLKSPGRFERILLRAANTHSSAKPCGQQSIHLGGVFELQPGASVFVNVTDPSQVSHGTGFTSFGLLKL

SEQ ID NO: 5078 - protein, 1000 aa, synthetic construct
  REGION 1..1000: note = SIRPA201/CLD201/hole/RF/CD40L
EEELQVIQPDKSVSVAAGESAILHCTVTSLIPVGPIQWFRGAGPARELIYNQKEGHFPRVTTVSESTKRENMDFSISISNITPADAGTYYCVKFRKGSPDTEFKSGAGTELSVRAKPSTSTSPTRSMAPGAVHLPQPVSTRTDWSPYADQSIKVRISLKSALGDKAYEWNDNEMYLFRSSVAYAMRQYFLKVKNQMILFGEEDVRVANLKPRISFNFFVTAPKNVSDIIPRTEVEKAIRMSRSRINDAFRLNDNSLEFLGIQPTLGPPNQPPVSTSTSPTRSMAPGAVHLPQPVSTRDKTHTCPPCPAPELLGGPSVFLFPPKPKDTLMISRTPEVTCVVVDVSHEDPEVKFNWYVDGVEVHNAKTKPREEQYNSTYRVVSVLTVLHQDWLNGKEYKCKVSNKALPAPIEKTISKAKGQPREPQVCTLPPSRDELTKNQVSLSCAVKGFYPSDIAVEWESNGQPENNYKTTPPVLDSDGSFFLVSKLTVDKSRWQQGNVFSCSVMHEALHNRFTQKSLSLSPGGGGSGGGGSEMQKGDQNPQIAAHVISEASSKTTSVLQWAEKGYYTMSNNLVTLENGKQLTVKRQGLYYIYAQVTFCSNREASSQAPFIASLCLKSPGRFERILLRAANTHSSAKPCGQQSIHLGGVFELQPGASVFVNVTDPSQVSHGTGFTSFGLLKLGGGSGGGGSEMQKGDQNPQIAAHVISEASSKTTSVLQWAEKGYYTMSNNLVTLENGKQLTVKRQGLYYIYAQVTFCSNREASSQAPFIASLCLKSPGRFERILLRAANTHSSAKPCGQQSIHLGGVFELQPGASVFVNVTDPSQVSHGTGFTSFGLLKLGGGSGGGGSEMQKGDQNPQIAAHVISEASSKTTSVLQWAEKGYYTMSNNLVTLENGKQLTVKRQGLYYIYAQVTFCSNREASSQAPFIASLCLKSPGRFERILLRAANTHSSAKPCGQQSIHLGGVFELQPGASVFVNVTDPSQVSHGTGFTSFGLLKL

SEQ ID NO: 5079 - protein, 927 aa, synthetic construct
  REGION 1..927: note = R_VH-CH1/knob/CD40L
QVQLQQPGAELVKPGASVKMSCKASGYTFTSYNMHWVKQTPGRGLEWIGAIYPGNGDTSYNQKFKGKATLTADKSSSTAYMQLSSLTSEDSAVYYCARSTYYGGDWYFNVWGAGTTVTVSAASTKGPSVFPLAPSSKSTSGGTAALGCLVKDYFPEPVTVSWNSGALTSGVHTFPAVLQSSGLYSLSSVVTVPSSSLGTQTYICNVNHKPSNTKVDKKVEPKSCDKTHTCPPCPAPELLGGPSVFLFPPKPKDTLMISRTPEVTCVVVDVSHEDPEVKFNWYVDGVEVHNAKTKPREEQYNSTYRVVSVLTVLHQDWLNGKEYKCKVSNKALPAPIEKTISKAKGQPREPQVYTLPPCRDELTKNQVSLWCLVKGFYPSDIAVEWESNGQPENNYKTTPPVLDSDGSFFLYSKLTVDKSRWQQGNVFSCSVMHEALHNHYTQKSLSLSPGGGGSGGGGSEMQKGDQNPQIAAHVISEASSKTTSVLQWAEKGYYTMSNNLVTLENGKQLTVKRQGLYYIYAQVTFCSNREASSQAPFIASLCLKSPGRFERILLRAANTHSSAKPCGQQSIHLGGVFELQPGASVFVNVTDPSQVSHGTGFTSFGLLKLGGGSGGGGSEMQKGDQNPQIAAHVISEASSKTTSVLQWAEKGYYTMSNNLVTLENGKQLTVKRQGLYYIYAQVTFCSNREASSQAPFIASLCLKSPGRFERILLRAANTHSSAKPCGQQSIHLGGVFELQPGASVFVNVTDPSQVSHGTGFTSFGLLKLGGGSGGGGSEMQKGDQNPQIAAHVISEASSKTTSVLQWAEKGYYTMSNNLVTLENGKQLTVKRQGLYYIYAQVTFCSNREASSQAPFIASLCLKSPGRFERILLRAANTHSSAKPCGQQSIHLGGVFELQPGASVFVNVTDPSQVSHGTGFTSFGLLKL

SEQ ID NO: 5080 - protein, 928 aa, synthetic construct
  REGION 1..928: note = Da_VH-CH1/N84S/knob/CD40L
EVQLLESGGGLVQPGGSLRLSCAVSGFTFNSFAMSWVRQAPGKGLEWVSAISGSGGGTYYADSVKGRFTISRDNSKNTLYLQMSSLRAEDTAVYFCAKDKILWFGEPVFDYWGQGTLVTVSSASTKGPSVFPLAPSSKSTSGGTAALGCLVKDYFPEPVTVSWNSGALTSGVHTFPAVLQSSGLYSLSSVVTVPSSSLGTQTYICNVNHKPSNTKVDKKVEPKSCDKTHTCPPCPAPELLGGPSVFLFPPKPKDTLMISRTPEVTCVVVDVSHEDPEVKFNWYVDGVEVHNAKTKPREEQYNSTYRVVSVLTVLHQDWLNGKEYKCKVSNKALPAPIEKTISKAKGQPREPQVYTLPPCRDELTKNQVSLWCLVKGFYPSDIAVEWESNGQPENNYKTTPPVLDSDGSFFLYSKLTVDKSRWQQGNVFSCSVMHEALHNHYTQKSLSLSPGGGGSGGGGSEMQKGDQNPQIAAHVISEASSKTTSVLQWAEKGYYTMSNNLVTLENGKQLTVKRQGLYYIYAQVTFCSNREASSQAPFIASLCLKSPGRFERILLRAANTHSSAKPCGQQSIHLGGVFELQPGASVFVNVTDPSQVSHGTGFTSFGLLKLGGGSGGGGSEMQKGDQNPQIAAHVISEASSKTTSVLQWAEKGYYTMSNNLVTLENGKQLTVKRQGLYYIYAQVTFCSNREASSQAPFIASLCLKSPGRFERILLRAANTHSSAKPCGQQSIHLGGVFELQPGASVFVNVTDPSQVSHGTGFTSFGLLKLGGGSGGGGSEMQKGDQNPQIAAHVISEASSKTTSVLQWAEKGYYTMSNNLVTLENGKQLTVKRQGLYYIYAQVTFCSNREASSQAPFIASLCLKSPGRFERILLRAANTHSSAKPCGQQSIHLGGVFELQPGASVFVNVTDPSQVSHGTGFTSFGLLKL

SEQ ID NO: 5081 - protein, 926 aa, synthetic construct
  REGION 1..926: note = Tr_VH-CH1/N84S/knob/CD40L
EVQLVESGGGLVQPGGSLRLSCAASGFNIKDTYIHWVRQAPGKGLEWVARIYPTNGYTRYADSVKGRFTISADTSKNTAYLQMSSLRAEDTAVYYCSRWGGDGFYAMDYWGQGTLVTVSSASTKGPSVFPLAPSSKSTSGGTAALGCLVKDYFPEPVTVSWNSGALTSGVHTFPAVLQSSGLYSLSSVVTVPSSSLGTQTYICNVNHKPSNTKVDKKVEPKSCDKTHTCPPCPAPELLGGPSVFLFPPKPKDTLMISRTPEVTCVVVDVSHEDPEVKFNWYVDGVEVHNAKTKPREEQYNSTYRVVSVLTVLHQDWLNGKEYKCKVSNKALPAPIEKTISKAKGQPREPQVYTLPPCRDELTKNQVSLWCLVKGFYPSDIAVEWESNGQPENNYKTTPPVLDSDGSFFLYSKLTVDKSRWQQGNVFSCSVMHEALHNHYTQKSLSLSPGGGGSGGGGSEMQKGDQNPQIAAHVISEASSKTTSVLQWAEKGYYTMSNNLVTLENGKQLTVKRQGLYYIYAQVTFCSNREASSQAPFIASLCLKSPGRFERILLRAANTHSSAKPCGQQSIHLGGVFELQPGASVFVNVTDPSQVSHGTGFTSFGLLKLGGGSGGGGSEMQKGDQNPQIAAHVISEASSKTTSVLQWAEKGYYTMSNNLVTLENGKQLTVKRQGLYYIYAQVTFCSNREASSQAPFIASLCLKSPGRFERILLRAANTHSSAKPCGQQSIHLGGVFELQPGASVFVNVTDPSQVSHGTGFTSFGLLKLGGGSGGGGSEMQKGDQNPQIAAHVISEASSKTTSVLQWAEKGYYTMSNNLVTLENGKQLTVKRQGLYYIYAQVTFCSNREASSQAPFIASLCLKSPGRFERILLRAANTHSSAKPCGQQSIHLGGVFELQPGASVFVNVTDPSQVSHGTGFTSFGLLKL

SEQ ID NO: 5082 - protein, 925 aa, synthetic construct
  REGION 1..925: note = Ce_VH-CH1/N84S/knob/CD40L
QVQLKQSGPGLVQPSQSLSITCTVSGFSLTNYGVHWVRQSPGKGLEWLGVIWSGGNTDYNTPFTSRLSINKDNSKSQVFFKMSSLQSNDTAIYYCARALTYYDYEFAYWGQGTLVTVSAASTKGPSVFPLAPSSKSTSGGTAALGCLVKDYFPEPVTVSWNSGALTSGVHTFPAVLQSSGLYSLSSVVTVPSSSLGTQTYICNVNHKPSNTKVDKKVEPKSCDKTHTCPPCPAPELLGGPSVFLFPPKPKDTLMISRTPEVTCVVVDVSHEDPEVKFNWYVDGVEVHNAKTKPREEQYNSTYRVVSVLTVLHQDWLNGKEYKCKVSNKALPAPIEKTISKAKGQPREPQVYTLPPCRDELTKNQVSLWCLVKGFYPSDIAVEWESNGQPENNYKTTPPVLDSDGSFFLYSKLTVDKSRWQQGNVFSCSVMHEALHNHYTQKSLSLSPGGGGSGGGGSEMQKGDQNPQIAAHVISEASSKTTSVLQWAEKGYYTMSNNLVTLENGKQLTVKRQGLYYIYAQVTFCSNREASSQAPFIASLCLKSPGRFERILLRAANTHSSAKPCGQQSIHLGGVFELQPGASVFVNVTDPSQVSHGTGFTSFGLLKLGGGSGGGGSEMQKGDQNPQIAAHVISEASSKTTSVLQWAEKGYYTMSNNLVTLENGKQLTVKRQGLYYIYAQVTFCSNREASSQAPFIASLCLKSPGRFERILLRAANTHSSAKPCGQQSIHLGGVFELQPGASVFVNVTDPSQVSHGTGFTSFGLLKLGGGSGGGGSEMQKGDQNPQIAAHVISEASSKTTSVLQWAEKGYYTMSNNLVTLENGKQLTVKRQGLYYIYAQVTFCSNREASSQAPFIASLCLKSPGRFERILLRAANTHSSAKPCGQQSIHLGGVFELQPGASVFVNVTDPSQVSHGTGFTSFGLLKL

SEQ ID NO: 5083 - protein, 927 aa, synthetic construct
  REGION 1..927: note = Cg_VH-CH1/N84S/knob/CD40L
QVQLVQSGAEVKKPGASVKVSCKASGYTFTEFGMNWVRQAPGQGLEWMGWINTKTGEATYVEEFKGRVTFTTDTSTSTAYMELRSLRSDDTAVYYCARWDFAYYVEAMDYWGQGTTVTVSSASTKGPSVFPLAPSSKSTSGGTAALGCLVKDYFPEPVTVSWNSGALTSGVHTFPAVLQSSGLYSLSSVVTVPSSSLGTQTYICNVNHKPSNTKVDKKVEPKSCDKTHTCPPCPAPELLGGPSVFLFPPKPKDTLMISRTPEVTCVVVDVSHEDPEVKFNWYVDGVEVHNAKTKPREEQYNSTYRVVSVLTVLHQDWLNGKEYKCKVSNKALPAPIEKTISKAKGQPREPQVYTLPPCRDELTKNQVSLWCLVKGFYPSDIAVEWESNGQPENNYKTTPPVLDSDGSFFLYSKLTVDKSRWQQGNVFSCSVMHEALHNHYTQKSLSLSPGGGGSGGGGSEMQKGDQNPQIAAHVISEASSKTTSVLQWAEKGYYTMSNNLVTLENGKQLTVKRQGLYYIYAQVTFCSNREASSQAPFIASLCLKSPGRFERILLRAANTHSSAKPCGQQSIHLGGVFELQPGASVFVNVTDPSQVSHGTGFTSFGLLKLGGGSGGGGSEMQKGDQNPQIAAHVISEASSKTTSVLQWAEKGYYTMSNNLVTLENGKQLTVKRQGLYYIYAQVTFCSNREASSQAPFIASLCLKSPGRFERILLRAANTHSSAKPCGQQSIHLGGVFELQPGASVFVNVTDPSQVSHGTGFTSFGLLKLGGGSGGGGSEMQKGDQNPQIAAHVISEASSKTTSVLQWAEKGYYTMSNNLVTLENGKQLTVKRQGLYYIYAQVTFCSNREASSQAPFIASLCLKSPGRFERILLRAANTHSSAKPCGQQSIHLGGVFELQPGASVFVNVTDPSQVSHGTGFTSFGLLKL

SEQ ID NO: 5084 - protein, 213 aa, synthetic construct; identical to SEQ ID NO: 1
  REGION 1..213: note = R_VK-CK

SEQ ID NO: 5085 - protein, 214 aa, synthetic construct; identical to SEQ ID NO: 686
  REGION 1..214: note = Da_VK-CK

SEQ ID NO: 5086 - protein, 214 aa, synthetic construct; identical to SEQ ID NO: 247
  REGION 1..214: note = Tr_VK-CK

SEQ ID NO: 5087 - protein, 214 aa, synthetic construct
  REGION 1..214: note = Ce_VK-CK
DILLTQSPVILSVSPGERVSFSCRASQSIGTNIHWYQQRTNGSPRLLIKYASESISGIPSRFSGSGSGTDFTLSINSVESEDIADYYCQQNNNWPTTFGAGTKLELKRTVAAPSVFIFPPSDEQLKSGTASVVCLLNNFYPREAKVQWKVDNALQSGNSQESVTEQDSKDSTYSLSSTLTLSKADYEKHKVYACEVTHQGLSSPVTKSFNRGEC

SEQ ID NO: 5088 - protein, 215 aa, synthetic construct; identical to SEQ ID NO: 51
  REGION 1..215: note = Cg_VK-CK

SEQ ID NO: 5089 - protein, 221 aa, synthetic construct; identical to SEQ ID NO: 4828
  REGION 1..221: note = Fc6/knob

SEQ ID NO: 5090 - protein, 698 aa, synthetic construct
  REGION 1..698: note = Fc6/knob/CD40L
CPPCPAPELLGGPSVFLFPPKPKDTLMISRTPEVTCVVVDVSHEDPEVKFNWYVDGVEVHNAKTKPREEQYNSTYRVVSVLTVLHQDWLNGKEYKCKVSNKALPAPIEKTISKAKGQPREPQVYTLPPCRDELTKNQVSLWCLVKGFYPSDIAVEWESNGQPENNYKTTPPVLDSDGSFFLYSKLTVDKSRWQQGNVFSCSVMHEALHNHYTQKSLSLSPGGGGSGGGGSEMQKGDQNPQIAAHVISEASSKTTSVLQWAEKGYYTMSNNLVTLENGKQLTVKRQGLYYIYAQVTFCSNREASSQAPFIASLCLKSPGRFERILLRAANTHSSAKPCGQQSIHLGGVFELQPGASVFVNVTDPSQVSHGTGFTSFGLLKLGGGSGGGGSEMQKGDQNPQIAAHVISEASSKTTSVLQWAEKGYYTMSNNLVTLENGKQLTVKRQGLYYIYAQVTFCSNREASSQAPFIASLCLKSPGRFERILLRAANTHSSAKPCGQQSIHLGGVFELQPGASVFVNVTDPSQVSHGTGFTSFGLLKLGGGSGGGGSEMQKGDQNPQIAAHVISEASSKTTSVLQWAEKGYYTMSNNLVTLENGKQLTVKRQGLYYIYAQVTFCSNREASSQAPFIASLCLKSPGRFERILLRAANTHSSAKPCGQQSIHLGGVFELQPGASVFVNVTDPSQVSHGTGFTSFGLLKL

SEQ ID NO: 5091 - protein, 449 aa, synthetic construct
  REGION 1..449: note = Tr_VH-CH
EVQLVESGGGLVQPGGSLRLSCAASGFNIKDTYIHWVRQAPGKGLEWVARIYPTNGYTRYADSVKGRFTISADTSKNTAYLQMNSLRAEDTAVYYCSRWGGDGFYAMDYWGQGTLVTVSSASTKGPSVFPLAPSSKSTSGGTAALGCLVKDYFPEPVTVSWNSGALTSGVHTFPAVLQSSGLYSLSSVVTVPSSSLGTQTYICNVNHKPSNTKVDKKVEPKSCDKTHTCPPCPAPELLGGPSVFLFPPKPKDTLMISRTPEVTCVVVDVSHEDPEVKFNWYVDGVEVHNAKTKPREEQYNSTYRVVSVLTVLHQDWLNGKEYKCKVSNKALPAPIEKTISKAKGQPREPQVYTLPPSREEMTKNQVSLTCLVKGFYPSDIAVEWESNGQPENNYKTTPPVLDSDGSFFLYSKLTVDKSRWQQGNVFSCSVMHEALHNHYTQKSLSLSPG

SEQ ID NO: 5092 - protein, 448 aa, synthetic construct
  REGION 1..448: note = Ce_VH-CH
QVQLKQSGPGLVQPSQSLSITCTVSGFSLTNYGVHWVRQSPGKGLEWLGVIWSGGNTDYNTPFTSRLSINKDNSKSQVFFKMNSLQSNDTAIYYCARALTYYDYEFAYWGQGTLVTVSAASTKGPSVFPLAPSSKSTSGGTAALGCLVKDYFPEPVTVSWNSGALTSGVHTFPAVLQSSGLYSLSSVVTVPSSSLGTQTYICNVNHKPSNTKVDKRVEPKSCDKTHTCPPCPAPELLGGPSVFLFPPKPKDTLMISRTPEVTCVVVDVSHEDPEVKFNWYVDGVEVHNAKTKPREEQYNSTYRVVSVLTVLHQDWLNGKEYKCKVSNKALPAPIEKTISKAKGQPREPQVYTLPPSREEMTKNQVSLTCLVKGFYPSDIAVEWESNGQPENNYKTTPPVLDSDGSFFLYSKLTVDKSRWQQGNVFSCSVMHEALHNHYTQKSLSLSPG

SEQ ID NO: 5093 - protein, 448 aa, synthetic construct
  REGION 1..448: note = Pt_VH-CH
EVQLVESGGGLVQPGGSLRLSCAASGFTFTDYTMDWVRQAPGKGLEWVADVNPNSGGSIYNQRFKGRFTLSVDRSKNTLYLQMNSLRAEDTAVYYCARNLGPSFYFDYWGQGTLVTVSSASTKGPSVFPLAPSSKSTSGGTAALGCLVKDYFPEPVTVSWNSGALTSGVHTFPAVLQSSGLYSLSSVVTVPSSSLGTQTYICNVNHKPSNTKVDKKVEPKSCDKTHTCPPCPAPELLGGPSVFLFPPKPKDTLMISRTPEVTCVVVDVSHEDPEVKFNWYVDGVEVHNAKTKPREEQYNSTYRVVSVLTVLHQDWLNGKEYKCKVSNKALPAPIEKTISKAKGQPREPQVYTLPPSREEMTKNQVSLTCLVKGFYPSDIAVEWESNGQPENNYKTTPPVLDSDGSFFLYSKLTVDKSRWQQGNVFSCSVMHEALHNHYTQKSLSLSPG

SEQ ID NO: 5094 - protein, 450 aa, synthetic construct
  REGION 1..450: note = Cg_VH-CH/PGLALA
QVQLVQSGAEVKKPGASVKVSCKASGYTFTEFGMNWVRQAPGQGLEWMGWINTKTGEATYVEEFKGRVTFTTDTSTSTAYMELRSLRSDDTAVYYCARWDFAYYVEAMDYWGQGTTVTVSSASTKGPSVFPLAPSSKSTSGGTAALGCLVKDYFPEPVTVSWNSGALTSGVHTFPAVLQSSGLYSLSSVVTVPSSSLGTQTYICNVNHKPSNTKVDKKVEPKSCDKTHTCPPCPAPEAAGGPSVFLFPPKPKDTLMISRTPEVTCVVVDVSHEDPEVKFNWYVDGVEVHNAKTKPREEQYNSTYRVVSVLTVLHQDWLNGKEYKCKVSNKALGAPIEKTISKAKGQPREPQVYTLPPSREEMTKNQVSLTCLVKGFYPSDIAVEWESNGQPENNYKTTPPVLDSDGSFFLYSKLTVDKSRWQQGNVFSCSVMHEALHNHYTQKSLSLSPG

SEQ ID NO: 5095 - protein, 452 aa, synthetic construct
  REGION 1..452: note = Be_VH-CH
EVQLVESGGGLVQPGGSLRLSCAASGYTFTNYGMNWVRQAPGKGLEWVGWINTYTGEPTYAADFKRRFTFSLDTSKSTAYLQMNSLRAEDTAVYYCAKYPHYYGSSHWYFDVWGQGTLVTVSSASTKGPSVFPLAPSSKSTSGGTAALGCLVKDYFPEPVTVSWNSGALTSGVHTFPAVLQSSGLYSLSSVVTVPSSSLGTQTYICNVNHKPSNTKVDKKVEPKSCDKTHTCPPCPAPELLGGPSVFLFPPKPKDTLMISRTPEVTCVVVDVSHEDPEVKFNWYVDGVEVHNAKTKPREEQYNSTYRVVSVLTVLHQDWLNGKEYKCKVSNKALPAPIEKTISKAKGQPREPQVYTLPPSREEMTKNQVSLTCLVKGFYPSDIAVEWESNGQPENNYKTTPPVLDSDGSFFLYSKLTVDKSRWQQGNVFSCSVMHEALHNHYTQKSLSLSPG

SEQ ID NO: 5096 - protein, 445 aa, synthetic construct
  REGION 1..445: note = Ra_VH-CH
EVQLVQSGGGLVKPGGSLRLSCAASGFTFSSYSMNWVRQAPGKGLEWVSSISSSSSYIYYADSVKGRFTISRDNAKNSLYLQMNSLRAEDTAVYYCARVTDAFDIWGQGTMVTVSSASTKGPSVLPLAPSSKSTSGGTAALGCLVKDYFPEPVTVSWNSGALTSGVHTFPAVLQSSGLYSLSSVVTVPSSSLGTQTYICNVNHKPSNTKVDKRVEPKSCDKTHTCPPCPAPELLGGPSVFLFPPKPKDTLMISRTPEVTCVVVDVSHEDPEVKFNWYVDGVEVHNAKTKPREEQYNSTYRVVSVLTVLHQDWLNGKEYKCKVSNKALPAPIEKTISKAKGQPREPQVYTLPPSREEMTKNQVSLTCLVKGFYPSDIAVEWESNGQPENNYKTTPPVLDSDGSFFLYSKLTVDKSRWQQGNVFSCSVMHEALHNHYTQKSLSLSPG

SEQ ID NO: 5097 - protein, 344 aa, synthetic construct
  REGION 1..344: note = SIRPA_Fc
EEELQVIQPDKSVSVAAGESAILHCTVTSLIPVGPIQWFRGAGPARELIYNQKEGHFPRVTTVSESTKRENMDFSISISNITPADAGTYYCVKFRKGSPDTEFKSGAGTELSVRAKPSDKTHTCPPCPAPELLGGPSVFLFPPKPKDTLMISRTPEVTCVVVDVSHEDPEVKFNWYVDGVEVHNAKTKPREEQYNSTYRVVSVLTVLHQDWLNGKEYKCKVSNKALPAPIEKTISKAKGQPREPQVYTLPPSRDELTKNQVSLTCLVKGFYPSDIAVEWESNGQPENNYKTTPPVLDSDGSFFLYSKLTVDKSRWQQGNVFSCSVMHEALHNHYTQKSLSLSPG

SEQ ID NO: 5098 - protein, 376 aa, synthetic construct
  REGION 1..376: note = IL-22_Fc
APISSHCRLDKSNFQQPYITNRTFMLAKEASLADNNTDVRLIGEKLFHGVSMSERCYLMKQVLNFTLEEVLFPQSDRFQPYMQEVVPFLARLSNRLSTCHIEGDDLHIQRNVQKLKDTVKKLGESGEIKAIGELDLLFMSLRNACIRVESKYGPPCPPCPAPEFLGGPSVFLFPPKPKDTLMISRTPEVTCVVVDVSQEDPEVQFNWYVDGVEVHNAKTKPREEQFGSTYRVVSVLTVLHQDWLNGKEYKCKVSNKGLPSSIEKTISKAKGQPREPQVYTLPPSQEEMTKNQVSLTCLVKGFYPSDIAVEWESNGQPENNYKTTPPVLDSDGSFFLYSRLTVDKSRWQEGNVFSCSVMHEALHNHYTQKSLSLSLG

SEQ ID NO: 5099 - protein, 214 aa, synthetic construct; identical to SEQ ID NO: 247
  REGION 1..214: note = Tr_VK-CK

SEQ ID NO: 5100 - protein, 214 aa, synthetic construct; identical to SEQ ID NO: 5087
  REGION 1..214: note = Ce_VK-CK

SEQ ID NO: 5101 - protein, 214 aa, synthetic construct
  REGION 1..214: note = Pt_VK-CK
DIQMTQSPSSLSASVGDRVTITCKASQDVSIGVAWYQQKPGKAPKLLIYSASYRYTGVPSRFSGSGSGTDFTLTISSLQPEDFATYYCQQYYIYPYTFGQGTKVEIKRTVAAPSVFIFPPSDEQLKSGTASVVCLLNNFYPREAKVQWKVDNALQSGNSQESVTEQDSKDSTYSLSSTLTLSKADYEKHKVYACEVTHQGLSSPVTKSFNRGEC

SEQ ID NO: 5102 - protein, 215 aa, synthetic construct; identical to SEQ ID NO: 51
  REGION 1..215: note = Cg_VK-CK

SEQ ID NO: 5103 - protein, 214 aa, synthetic construct
  REGION 1..214: note = Be_VK-CK
DIQMTQSPSSLSASVGDRVTITCSASQDISNYLNWYQQKPGKAPKVLIYFTSSLHSGVPSRFSGSGSGTDFTLTISSLQPEDFATYYCQQYSTVPWTFGQGTKVEIKRTVAAPSVFIFPPSDEQLKSGTASVVCLLNNFYPREAKVQWKVDNALQSGNSQESVTEQDSKDSTYSLSSTLTLSKADYEKHKVYACEVTHQGLSSPVTKSFNRGEC

SEQ ID NO: 5104 - protein, 214 aa, synthetic construct
  REGION 1..214: note = Ra_VK-CK
DIQMTQSPSSVSASIGDRVTITCRASQGIDNWLGWYQQKPGKAPKLLIYDASNLDTGVPSRFSGSGSGTYFTLTISSLQAEDFAVYFCQQAKAFPPTFGGGTKVDIKRTVAAPSVFIFPPSDEQLKSGTASVVCLLNNFYPREAKVQWKVDNALQSGNSQESVTEQDSKDSTYSLSSTLTLSKADYEKHKVYACEVTHQGLSSPVTKSFNRGEC

SEQ ID NO: 5105 - protein, 119 aa, synthetic construct
  REGION 1..119: note = abagovomab heavy chain V region
QVKLQESGAELARPGASVKLSCKASGYTFTNYWMQWVKQRPGQGLDWIGAIYPGDGNTRYTHKFKGKATLTADKSSSTAYMQLSSLASEDSGVYYCARGEGNYAWFAYWGQGTTVTVSS

SEQ ID NO: 5106 - protein, 9 aa, synthetic construct
  REGION 1..9: note = abagovomab heavy chain CDR1
GYTFTNYWM

SEQ ID NO: 5107 - protein, 8 aa, synthetic construct
  REGION 1..8: note = abagovomab heavy chain CDR2
IYPGDGNT

SEQ ID NO: 5108 - protein, 12 aa, synthetic construct
  REGION 1..12: note = abagovomab heavy chain CDR3
ARGEGNYAWFAY

SEQ ID NO: 5109 - protein, 107 aa, synthetic construct
  REGION 1..107: note = abagovomab light chain V region
DIELTQSPASLSASVGETVTITCQASENIYSYLAWHQQKQGKSPQLLVYNAKTLAGGVSSRFSGSGSGTHFSLKIKSLQPEDFGIYYCQHHYGILPTFGGGTKLEIK

SEQ ID NO: 5110 - protein, 6 aa, synthetic construct
  REGION 1..6: note = abagovomab light chain CDR1
ENIYSY

SEQ ID NO: 5111 - skipped

SEQ ID NO: 5112 - protein, 9 aa, synthetic construct
  REGION 1..9: note = abagovomab light chain CDR3
QHHYGILPT

SEQ ID NO: 5113 - protein, 122 aa, synthetic construct
  REGION 1..122: note = abelacimab heavy chain V region
QVQLLESGGGLVQPGGSLRLSCAASGFTFSTAAMSWVRQAPGKGLEWVSGISGSGSSTYYADSVKGRFTISRDNSKNTLYLQMNSLRAEDTAVYYCARELSYLYSGYYFDYWGQGTLVTVSS

SEQ ID NO: 5114 - protein, 8 aa, synthetic construct
  REGION 1..8: note = abelacimab heavy chain CDR1
GFTFSTAA

SEQ ID NO: 5115 - protein, 8 aa, synthetic construct
  REGION 1..8: note = abelacimab heavy chain CDR2
ISGSGSST

SEQ ID NO: 5116 - protein, 15 aa, synthetic construct
  REGION 1..15: note = abelacimab heavy chain CDR3
ARELSYLYSGYYFDY

SEQ ID NO: 5117 - protein, 121 aa, synthetic construct
  REGION 1..121: note = abelacimab light chain V region
QSVLTQPPSASGTPGQRVTISCSGSSSNIGSNDVSWYQQLPGTAPKLLIYKNYNRPSGVPDRFSGSKSGTSASLAISGLQSEDEADYYCSAWDQRQFDVVFGGGTKLTVLGQPKAAPSVTL

SEQ ID NO: 5118 - protein, 8 aa, synthetic construct
  REGION 1..8: note = abelacimab light chain CDR1
SSNIGSND

SEQ ID NO: 5119 - skipped

SEQ ID NO: 5120 - protein, 11 aa, synthetic construct
  REGION 1..11: note = abelacimab light chain CDR3
SAWDQRQFDVV

SEQ ID NO: 5121 - protein, 118 aa, synthetic construct [sequence omitted]

SEQ ID NO: 5122 - protein, 8 aa, synthetic construct
  REGION 1..8: note = abituzumab heavy chain CDR1
GYTFSSFW

SEQ ID NO: 5123 - protein, 8 aa, synthetic construct
  REGION 1..8: note = abituzumab heavy chain CDR2
INPRSGYT

SEQ ID NO: 5124 - protein, 11 aa, synthetic construct
  REGION 1..11: note = abituzumab heavy chain CDR3
ASFLGRGAMDY

SEQ ID NO: 5125 - protein, 107 aa, synthetic construct [sequence omitted]

SEQ ID NO: 5126 - protein, 6 aa, synthetic construct
  REGION 1..6: note = abituzumab light chain CDR1
QDISNY

SEQ ID NO: 5127 - skipped

SEQ ID NO: 5128 - protein, 9 aa, synthetic construct
  REGION 1..9: note = abituzumab light chain CDR3
QQGNTFPYT

SEQ ID NO: 5129 - protein, 120 aa, synthetic construct
  REGION 1..120: note = abrezekimab heavy chain V region
QVTLKESGPVLVKPTETLTLTCTVSGFSLTNYHVQWIRQPPGKALEWLGVMWSDGDTSFNSVLKSRLTISRDTSKSQVVLTMTNMDPVDTATYYCARDGTIAAMDYFDYWGQGTLVTVSS

SEQ ID NO: 5130 - protein, 8 aa, synthetic construct
  REGION 1..8: note = abrezekimab heavy chain CDR1
GFSLTNYH

SEQ ID NO: 5131 - protein, 7 aa, synthetic construct
  REGION 1..7: note = abrezekimab heavy chain CDR2
MWSDGDT

SEQ ID NO: 5132 - protein, 14 aa, synthetic construct
  REGION 1..14: note = abrezekimab heavy chain CDR3
ARDGTIAAMDYFDY

SEQ ID NO: 5133 - protein, 107 aa, synthetic construct
  REGION 1..107: note = abrezekimab light chain V region
DIQMTQSPSSLSASVGDRVTITCLASEDISNYLAWYQQKPGKAPKLLIYHTSRLQDGVPSRFSGSGSGTDFTLTISSLQPEDFATYYCQQGYRFPLTFGGGTKVEIK

SEQ ID NO: 5134 - protein, 6 aa, synthetic construct
  REGION 1..6: note = abrezekimab light chain CDR1
EDISNY

SEQ ID NO: 5135 - skipped

SEQ ID NO: 5136 - protein, 9 aa, synthetic construct
  REGION 1..9: note = abrezekimab light chain CDR3
QQGYRFPLT

SEQ ID NO: 5137 - protein, 118 aa, synthetic construct [sequence omitted]

SEQ ID NO: 5138 - protein, 8 aa, synthetic construct
  REGION 1..8: note = abrilumab heavy chain CDR1
GYTLSDLS

SEQ ID NO: 5139 - protein, 8 aa, synthetic construct
  REGION 1..8: note = abrilumab heavy chain CDR2
FDPQDGET

SEQ ID NO: 5140 - protein, 11 aa, synthetic construct
  REGION 1..11: note = abrilumab heavy chain CDR3
ATGSSSSWFDP

SEQ ID NO: 5141 - protein, 107 aa, synthetic construct [sequence omitted]

SEQ ID NO: 5142 - protein, 6 aa, synthetic construct
  REGION 1..6: note = abrilumab light chain CDR1
QGISSW

SEQ ID NO: 5143 - skipped

SEQ ID NO: 5144 - protein, 9 aa, synthetic construct
  REGION 1..9: note = abrilumab light chain CDR3
QQANSFPWT

SEQ ID NO: 5145 - protein, 121 aa, synthetic construct
  REGION 1..121: note = acapatamab heavy chain V region
QVQLVESGGGLVKPGESLRLSCAASGFTFSDYYMYWVRQAPGKCLEWVAIISDGGYYTYYSDIIKGRFTISRDNAKNSLYLQMNSLKAEDTAVYYCARGFPLLRHGAMDYWGQGTLVTVSS

SEQ ID NO: 5146 - protein, 8 aa, synthetic construct
  REGION 1..8: note = acapatamab heavy chain CDR1
GFTFSDYY

SEQ ID NO: 5147 - protein, 8 aa, synthetic construct
  REGION 1..8: note = acapatamab heavy chain CDR2
ISDGGYYT

SEQ ID NO: 5148 - protein, 14 aa, synthetic construct
  REGION 1..14: note = acapatamab heavy chain CDR3
ARGFPLLRHGAMDY

SEQ ID NO: 5149 - protein, 107 aa, synthetic construct
  REGION 1..107: note = acapatamab light chain V region
DIQMTQSPSSLSASVGDRVTITCKASQNVDTNVAWYQQKPGQAPKSLIYSASYVYWDVPSRFSGSASGTDFTLTISSVQSEDFATYYCQQYDQQLITFGCGTKLEIK

SEQ ID NO: 5150 - protein, 6 aa, synthetic construct
  REGION 1..6: note = acapatamab light chain CDR1
QNVDTN

SEQ ID NO: 5151 - skipped

SEQ ID NO: 5152 - protein, 9 aa, synthetic construct
  REGION 1..9: note = acapatamab light chain CDR3
QQYDQQLIT

SEQ ID NO: 5153 - protein, 121 aa, synthetic construct
  REGION 1..121: note = acasunlimab heavy chain V region
EVQLLEPGGGLVQPGGSLRLSCEASGSTFSTYAMSWVRQAPGKGLEWVSGFSGSGGFTFYADSVRGRFTISRDSSKNTLFLQMSSLRAEDTAVYYCAIPARGYNYGSFQHWGQGTLVTVSS

SEQ ID NO: 5154 - protein, 8 aa, synthetic construct
  REGION 1..8: note = acasunlimab heavy chain CDR1
GSTFSTYA

SEQ ID NO: 5155 - protein, 8 aa, synthetic construct
  REGION 1..8: note = acasunlimab heavy chain CDR2
FSGSGGFT

SEQ ID NO: 5156 - protein, 14 aa, synthetic construct
  REGION 1..14: note = acasunlimab heavy chain CDR3
AIPARGYNYGSFQH

SEQ ID NO: 5157 - protein, 108 aa, synthetic construct
  REGION 1..108: note = acasunlimab light chain V region
SYVLTQPPSVSVAPGQTARITCGGNNIGSKSVHWYQQKPGQAPVLVVYDDNDRPSGLPERFSGSNSGNTATLTISRVEAGDEADYYCQVWDSSSDHVVFGGGTKLTVL

SEQ ID NO: 5158 - protein, 6 aa, synthetic construct
  REGION 1..6: note = acasunlimab light chain CDR1
NIGSKS

SEQ ID NO: 5159 - skipped

SEQ ID NO: 5160 - protein, 11 aa, synthetic construct
  REGION 1..11: note = acasunlimab light chain CDR3
QVWDSSSDHVV

SEQ ID NO: 5161 - protein, 122 aa, synthetic construct
  REGION 1..122: note = actoxumab heavy chain V region
QVQLVESGGGVVQPGRSLRLSCAASGFSFSNYGMHWVRQAPGKGLEWVALIWYDGSNEDYTDSVKGRFTISRDNSKNTLYLQMNSLRAEDTAVYYCARWGMVRGVIDVFDIWGQGTVVTVSS

SEQ ID NO: 5162 - protein, 8 aa, synthetic construct
  REGION 1..8: note = actoxumab heavy chain CDR1
GFSFSNYG

SEQ ID NO: 5163 - protein, 8 aa, synthetic construct
  REGION 1..8: note = actoxumab heavy chain CDR2
IWYDGSNE

SEQ ID NO: 5164 - protein, 15 aa, synthetic construct
  REGION 1..15: note = actoxumab heavy chain CDR3
ARWGMVRGVIDVFDI

SEQ ID NO: 5165 - protein, 107 aa, synthetic construct
  REGION 1..107: note = actoxumab light chain V region
DIQMTQSPSSVSASVGDRVTITCRASQGISSWLAWYQHKPGKAPKLLIYAASSLQSGVPSRFSGSGSGTDFTLTISSLQPEDFATYYCQQANSFPWTFGQGTKVEIK

SEQ ID NO: 5166 - protein, 6 aa, synthetic construct
  REGION 1..6: note = actoxumab light chain CDR1
QGISSW

SEQ ID NO: 5167 - skipped

SEQ ID NO: 5168 - protein, 9 aa, synthetic construct
  REGION 1..9: note = actoxumab light chain CDR3
QQANSFPWT

SEQ ID NO: 5169 - protein, 107 aa, synthetic construct
  REGION 1..107: note = adalimumab beta heavy chain V region
EVQLVESGGGLVQPGRSLRLSCAASGFTFDDYAMHWVRQAPGKGLEWVSAITWNSGHIDYADSVEGRFTISRDNAKNSLYLQMNSLRAEDTAVYYCAKVSYLSTASS

SEQ ID NO: 5170 - protein, 8 aa, synthetic construct
  REGION 1..8: note = adalimumab beta heavy chain CDR1
GFTFDDYA

SEQ ID NO: 5171 - protein, 8 aa, synthetic construct
  REGION 1..8: note = adalimumab beta heavy chain CDR2
ITWNSGHI

SEQ ID NO: 5172 - protein, 14 aa, synthetic construct
  REGION 1..14: note = adalimumab beta heavy chain CDR3
AKVSYLSTASSLDY

SEQ ID NO: 5173 - protein, 107 aa, synthetic construct [sequence omitted]

SEQ ID NO: 5174 - protein, 6 aa, synthetic construct
  REGION 1..6: note = adalimumab beta light chain CDR1
QGIRNY

SEQ ID NO: 5175 - skipped

SEQ ID NO: 5176 - protein, 9 aa, synthetic construct
  REGION 1..9: note = adalimumab beta light chain CDR3
QRYNRAPYT

SEQ ID NO: 5177 - protein, 119 aa, synthetic construct
  REGION 1..119: note = adebrelimab heavy chain V region
QVQLVQSGAEVKKPGASVKVSCKASGYTFTSYWMHWVRQAPGQGLEWMGRIGPNSGFTSYNEKFKNRVTMTRDTSTSTVYMELSSLRSEDTAVYYCARGGSSYDYFDYWGQGTTVTVSS

SEQ ID NO: 5178 - protein, 8 aa, synthetic construct
  REGION 1..8: note = adebrelimab heavy chain CDR1
GYTFTSYW

SEQ ID NO: 5179 - protein, 8 aa, synthetic construct
  REGION 1..8: note = adebrelimab heavy chain CDR2
IGPNSGFT

SEQ ID NO: 5180 - protein, 12 aa, synthetic construct
  REGION 1..12: note = adebrelimab heavy chain CDR3
ARGGSSYDYFDY

SEQ ID NO: 5181 - protein, 111 aa, synthetic construct
  REGION 1..111: note = adebrelimab light chain V region
DIVLTQSPASLAVSPGQRATITCRASESVSIHGTHLMHWYQQKPGQPPKLLIYAASNLESGVPARFSGSGSGTDFTLTINPVEAEDTANYYCQQSFEDPLTFGQGTKLEIK

SEQ ID NO: 5182 - protein, 10 aa, synthetic construct
  REGION 1..10: note = adebrelimab light chain CDR1
ESVSIHGTHL

SEQ ID NO: 5183 - skipped

SEQ ID NO: 5184 - protein, 9 aa, synthetic construct
  REGION 1..9: note = adebrelimab light chain CDR3
QQSFEDPLT

SEQ ID NO: 5185 - protein, 124 aa, synthetic construct
  REGION 1..124: note = adintrevimab heavy chain V region
EVQLVESGGGLVKPGGSLRLSCAASGFTFSSYYMNWVRQAPGKGLEWVSSISEDGYSTYYPDSLKGRFTISRDSAKNSLYLQMNSLRADDTAVYYCARDFSGHTAWAGTGFEYWGQGTLVTVSS

SEQ ID NO: 5186 - protein, 8 aa, synthetic construct
  REGION 1..8: note = adintrevimab heavy chain CDR1
GFTFSSYY

SEQ ID NO: 5187 - protein, 8 aa, synthetic construct
  REGION 1..8: note = adintrevimab heavy chain CDR2
ISEDGYST

SEQ ID NO: 5188 - protein, 17 aa, synthetic construct
  REGION 1..17: note = adintrevimab heavy chain CDR3
ARDFSGHTAWAGTGFEY

SEQ ID NO: 5189 - protein, 112 aa, synthetic construct
  REGION 1..112: note = adintrevimab light chain V region
QSVLTQPPSVSGAPGQRITISCTGSSSNIGAGYDVHWYQQLPGTAPKLLIYGSSSRNSGVPDRFSGSKSGTSASLAITGLQAEDEADYYCQSYDSSLSVLYTFGTGTKVTVL

SEQ ID NO: 5190 - protein, 9 aa, synthetic construct
  REGION 1..9: note = adintrevimab light chain CDR1
SSNIGAGYD

SEQ ID NO: 5191 - skipped

SEQ ID NO: 5192 - protein, 12 aa, synthetic construct
  REGION 1..12: note = adintrevimab light chain CDR3
QSYDSSLSVLYT

SEQ ID NO: 5193 - protein, 124 aa, synthetic construct
  REGION 1..124: note = aducanumab heavy chain V region
QVQLVESGGGVVQPGRSLRLSCAASGFAFSSYGMHWVRQAPGKGLEWVAVIWFDGTKKYYTDSVKGRFTISRDNSKNTLYLQMNTLRAEDTAVYYCARDRGIGARRGPYYMDVWGKGTTVTVSS

SEQ ID NO: 5194 - protein, 8 aa, synthetic construct
  REGION 1..8: note = aducanumab heavy chain CDR1
GFAFSSYG

SEQ ID NO: 5195 - protein, 8 aa, synthetic construct
  REGION 1..8: note = aducanumab heavy chain CDR2
IWFDGTKK

SEQ ID NO: 5196 - protein, 10 aa, synthetic construct
  REGION 1..10: note = aducanumab heavy chain CDR3
ARRGPYYMDV

SEQ ID NO: 5197 - protein, 107 aa, synthetic construct [sequence omitted]

SEQ ID NO: 5198 - protein, 6 aa, synthetic construct
  REGION 1..6: note = aducanumab light chain CDR1
QSISSY

SEQ ID NO: 5199 - skipped

SEQ ID NO: 5200 - protein, 9 aa, synthetic construct
  REGION 1..9: note = aducanumab light chain CDR3
QQSYSTPLT

SEQ ID NO: 5201 - protein, 123 aa, synthetic construct
  REGION 1..123: note = afasevikumab heavy chain V region
EVQLVESGGGLVQPGRSLRLSCAASGFTFDDYAMHWVRQAPGKGLEWVSGINWSSGGIGYADSVKGRFTISRDNAKNSLYLQMNSLRAEDTALYYCARDIGGFGEFYWNFGLWGRGTLVTVSS

SEQ ID NO: 5202 - protein, 8 aa, synthetic construct
  REGION 1..8: note = afasevikumab heavy chain CDR1
GFTFDDYA

SEQ ID NO: 5203 - protein, 8 aa, synthetic construct
  REGION 1..8: note = afasevikumab heavy chain CDR2
INWSSGGI

SEQ ID NO: 5204 - protein, 16 aa, synthetic construct
  REGION 1..16: note = afasevikumab heavy chain CDR3
ARDIGGFGEFYWNFGL

SEQ ID NO: 5205 - protein, 108 aa, synthetic construct
  REGION 1..108: note = afasevikumab light chain V region
EIVLTQSPATLSLSPGERATLSCRASQSVRSYLAWYQQKPGQAPRLLIYDASNRATGIPARFSGSGSGTDFTLTISSLEPEDFAVYYCQQRSNWPPATFGGGTKVEIK

SEQ ID NO: 5206 - protein, 6 aa, synthetic construct
  REGION 1..6: note = afasevikumab light chain CDR1
QSVRSY

SEQ ID NO: 5207 - skipped

SEQ ID NO: 5208 - protein, 10 aa, synthetic construct
  REGION 1..10: note = afasevikumab light chain CDR3
QQRSNWPPAT

SEQ ID NO: 5209 - protein, 121 aa, synthetic construct
  REGION 1..121: note = alemtuzumab heavy chain V region
QVQLQESGPGLVRPSQTLSLTCTVSGFTFTDFYMNWVRQPPGRGLEWIGFIRDKAKGYTTEYNPSVKGRVTMLVDTSKNQFSLRLSSVTAADTAVYYCAREGHTAAPFDYWGQGSLVTVSS

SEQ ID NO: 5210 - protein, 8 aa, synthetic construct
  REGION 1..8: note = alemtuzumab heavy chain CDR1
GFTFTDFY

SEQ ID NO: 5211 - protein, 10 aa, synthetic construct
  REGION 1..10: note = alemtuzumab heavy chain CDR2
IRDKAKGYTT

SEQ ID NO: 5212 - protein, 12 aa, synthetic construct
  REGION 1..12: note = alemtuzumab heavy chain CDR3
AREGHTAAPFDY

SEQ ID NO: 5213 - protein, 107 aa, synthetic construct
  REGION 1..107: note = alemtuzumab light chain V region
DIQMTQSPSSLSASVGDRVTITCKASQNIDKYLNWYQQKPGKAPKLLIYNTNNLQTGVPSRFSGSGSGTDFTFTISSLQPEDIATYYCLQHISRPRTFGQGTKVEIK

SEQ ID NO: 5214 - protein, 6 aa, synthetic construct
  REGION 1..6: note = alemtuzumab light chain CDR1
QNIDKY

SEQ ID NO: 5215 - skipped

SEQ ID NO: 5216 - protein, 9 aa, synthetic construct
  REGION 1..9: note = alemtuzumab light chain CDR3
LQHISRPRT

SEQ ID NO: 5217 - protein, 118 aa, synthetic construct [sequence omitted]

SEQ ID NO: 5218 - protein, 8 aa, synthetic construct
  REGION 1..8: note = alirocumab heavy chain CDR1
GFTFNNYA

SEQ ID NO: 5219 - protein, 8 aa, synthetic construct
  REGION 1..8: note = alirocumab heavy chain CDR2
ISGSGGTT

SEQ ID NO: 5220 - protein, 11 aa, synthetic construct
  REGION 1..11: note = alirocumab heavy chain CDR3
AKDSNWGNFDL

SEQ ID NO: 5221 - protein, 113 aa, synthetic construct [sequence omitted]

SEQ ID NO: 5222 - protein, 12 aa, synthetic construct
  REGION 1..12: note = alirocumab light chain CDR1
QSVLYRSNNRNF

SEQ ID NO: 5223 - skipped

SEQ ID NO: 5224 - protein, 9 aa, synthetic construct
  REGION 1..9: note = alirocumab light chain CDR3
QQYYTTPYT

SEQ ID NO: 5225 - protein, 124 aa, synthetic construct
  REGION 1..124: note = alomfilimab heavy chain V region
EVQLVESGGGVVRPGGSLRLSCVASGVTFDDYGMSWVRQAPGKGLEWVSGINWNGGDTDYSDSVKGRFTISRDNAKNSLYLQMNSLRAEDTALYYCARDFYGSGSYYHVPFDYWGQGILVTVSS

SEQ ID NO: 5226 - protein, 8 aa, synthetic construct
  REGION 1..8: note = alomfilimab heavy chain CDR1
GVTFDDYG

SEQ ID NO: 5227 - protein, 8 aa, synthetic construct
  REGION 1..8: note = alomfilimab heavy chain CDR2
INWNGGDT

SEQ ID NO: 5228 - protein, 17 aa, synthetic construct
  REGION 1..17: note = alomfilimab heavy chain CDR3
ARDFYGSGSYYHVPFDY

SEQ ID NO: 5229 - protein, 108 aa, synthetic construct
  REGION 1..108: note = alomfilimab light chain V region
EIVLTQSPGTLSLSPGERATLSCRASQSVSRSYLAWYQQKRGQAPRLLIYGASSRATGIPDRFSGDGSGTDFTLSISRLEPEDFAVYYCHQYDMSPFTFGPGTKVDIK

SEQ ID NO: 5230 - protein, 7 aa, synthetic construct
  REGION 1..7: note = alomfilimab light chain CDR1
QSVSRSY

SEQ ID NO: 5231 - skipped

SEQ ID NO: 5232 - protein, 9 aa, synthetic construct
  REGION 1..9: note = alomfilimab light chain CDR3
HQYDMSPFT

SEQ ID NO: 5233 - protein, 120 aa, synthetic construct
  REGION 1..120: note = alsevalimab heavy chain V region
QLQLQESGPGLVKPSETLSLTCTVSGGSIKSGSYYWGWIRQPPGKGLEWIGNIYYSGSTYYNPSLRSRVTISVDTSKNQFSLKLSSVTAADTAVYYCAREGSYPNQFDPWGQGTLVTVSS

SEQ ID NO: 5234 - protein, 10 aa, synthetic construct
  REGION 1..10: note = alsevalimab heavy chain CDR1
GGSIKSGSYY

SEQ ID NO: 5235 - protein, 7 aa, synthetic construct
  REGION 1..7: note = alsevalimab heavy chain CDR2
IYYSGST

SEQ ID NO: 5236 - protein, 12 aa, synthetic construct
  REGION 1..12: note = alsevalimab heavy chain CDR3
AREGSYPNQFDP

SEQ ID NO: 5237 - protein, 107 aa, synthetic construct
  REGION 1..107: note = alsevalimab light chain V region
EIVMTQSPATLSVSPGERATLSCRASQSVSSNLAWYQQKPGQAPRLLIYGASTRATGIPARFSGSGSGTEFTLTISSLQSEDFAVYYCQQYHSFPFTFGGGTKVEIK

SEQ ID NO: 5238 - protein, 6 aa, synthetic construct
  REGION 1..6: note = alsevalimab light chain CDR1
QSVSSN

SEQ ID NO: 5239 - skipped

SEQ ID NO: 5240 - protein, 9 aa, synthetic construct
  REGION 1..9: note = alsevalimab light chain CDR3
QQYHSFPFT

SEQ ID NO: 5241 - protein, 125 aa, synthetic construct [sequence omitted]

SEQ ID NO: 5242 - protein, 8 aa, synthetic construct
  REGION 1..8: note = amivantamab heavy chain CDR1
GFTFSTYG

SEQ ID NO: 5243 - protein, 8 aa, synthetic construct
  REGION 1..8: note = amivantamab heavy chain CDR2
IWDDGSYK

SEQ ID NO: 5244 - protein, 18 aa, synthetic construct
  REGION 1..18: note = amivantamab heavy chain CDR3
ARDGITMVRGVMKDYFDY

SEQ ID NO: 5245 - protein, 107 aa, synthetic construct [sequence omitted]

SEQ ID NO: 5246 - protein, 6 aa, synthetic construct
  REGION 1..6: note = amivantamab light chain CDR1
QDISSA

SEQ ID NO: 5247 - skipped

SEQ ID NO: 5248 - protein, 9 aa, synthetic construct
  REGION 1..9: note = amivantamab light chain CDR3
QQFNSYPLT

SEQ ID NO: 5249 - protein, 117 aa, synthetic construct
  REGION 1..117: note = amubarvimab heavy chain V region
EVQLVESGGGLVQPGGSLRLSCAASGITVSSNYMNWVRQAPGKGLEWVSLIYSGGSTYYADSVKGRFTISRDNSKNTLYLQMNSLRAEDTAVYHCARDLVVYGMDVWGQGTTVTVSS

SEQ ID NO: 5250 - protein, 8 aa, synthetic construct
  REGION 1..8: note = amubarvimab heavy chain CDR1
GITVSSNY

SEQ ID NO: 5251 - protein, 7 aa, synthetic construct
  REGION 1..7: note = amubarvimab heavy chain CDR2
IYSGGST

SEQ ID NO: 5252 - protein, 11 aa, synthetic construct
  REGION 1..11: note = amubarvimab heavy chain CDR3
ARDLVVYGMDV

SEQ ID NO: 5253 - protein, 107 aa, synthetic construct
  REGION 1..107: note = amubarvimab light chain V region
EIVLTQSPGTLSLSPGERATLSCRASQSVSSSYLAWYQQKPGQAPRLLIYGASSRATGIPDRFSGSGSGTDFTLTISRLEPEDFAVYYCQQYGSSPTFGQGTKLEIK

SEQ ID NO: 5254 - protein, 7 aa, synthetic construct
  REGION 1..7: note = amubarvimab light chain CDR1
QSVSSSY

SEQ ID NO: 5255 - skipped

SEQ ID NO: 5256 - protein, 8 aa, synthetic construct
  REGION 1..8: note = amubarvimab light chain CDR3
QQYGSSPT

SEQ ID NO: 5257 - protein, 120 aa, synthetic construct
  REGION 1..120: note = anetumab corixetan heavy chain V region
QVELVQSGAEVKKPGESLKISCKGSGYSFTSYWIGWVRQAPGKGLEWMGIIDPGDSRTRYSPSFQGQVTISADKSISTAYLQWSSLKASDTAMYYCARGQLYGGTYMDGWGQGTLVTVSS

SEQ ID NO: 5258 - protein, 8 aa, synthetic construct
  REGION 1..8: note = anetumab corixetan heavy chain CDR1
GYSFTSYW

SEQ ID NO: 5259 - protein, 8 aa, synthetic construct
  REGION 1..8: note = anetumab corixetan heavy chain CDR2
IDPGDSRT

SEQ ID NO: 5260 - protein, 13 aa, synthetic construct
  REGION 1..13: note = anetumab corixetan heavy chain CDR3
ARGQLYGGTYMDG

SEQ ID NO: 5261 - protein, 111 aa, synthetic construct
  REGION 1..111: note = anetumab corixetan light chain V region
DIALTQPASVSGSPGQSITISCTGTSSDIGGYNSVSWYQQHPGKAPKLMIYGVNNRPSGVSNRFSGSKSGNTASLTISGLQAEDEADYYCSSYDIESATPVFGGGTKLTVL

SEQ ID NO: 5262 - protein, 9 aa, synthetic construct
  REGION 1..9: note = anetumab corixetan light chain CDR1
SSDIGGYNS

SEQ ID NO: 5263 - skipped

SEQ ID NO: 5264 - protein, 11 aa, synthetic construct
  REGION 1..11: note = anetumab corixetan light chain CDR3
SSYDIESATPV

SEQ ID NO: 5265 - protein, 120 aa, synthetic construct; identical to SEQ ID NO: 5257
  REGION 1..120: note = anetumab ravtansine heavy chain V region

SEQ ID NO: 5266 - protein, 8 aa, synthetic construct
  REGION 1..8: note = anetumab ravtansine heavy chain CDR1
GYSFTSYW

SEQ ID NO: 5267 - protein, 8 aa, synthetic construct
  REGION 1..8: note = anetumab ravtansine heavy chain CDR2
IDPGDSRT

SEQ ID NO: 5268 - protein, 13 aa, synthetic construct
  REGION 1..13: note = anetumab ravtansine heavy chain CDR3
ARGQLYGGTYMDG

SEQ ID NO: 5269 - protein, 111 aa, synthetic construct; identical to SEQ ID NO: 5261
  REGION 1..111: note = anetumab ravtansine light chain V region

SEQ ID NO: 5270 - protein, 9 aa, synthetic construct
  REGION 1..9: note = anetumab ravtansine light chain CDR1
SSDIGGYNS

SEQ ID NO: 5271 - skipped

SEQ ID NO: 5272 - protein, 11 aa, synthetic construct
  REGION 1..11: note = anetumab ravtansine light chain CDR3
SSYDIESATPV

SEQ ID NO: 5273 - protein, 117 aa, synthetic construct [sequence omitted]

SEQ ID NO: 5274 - protein, 8 aa, synthetic construct
  REGION 1..8: note = anifrolumab heavy chain CDR1
GYIFTNYW

SEQ ID NO: 5275 - protein, 8 aa, synthetic construct
  REGION 1..8: note = anifrolumab heavy chain CDR2
IYPGDSDI

SEQ ID NO: 5276 - protein, 10 aa, synthetic construct
  REGION 1..10: note = anifrolumab heavy chain CDR3
ARHDIEGFDY

SEQ ID NO: 5277 - protein, 108 aa, synthetic construct [sequence omitted]

SEQ ID NO: 5278 - protein, 8 aa, synthetic construct
  REGION 1..8: note = anifrolumab light chain CDR1
QSVSSSFF

SEQ ID NO: 5279 - skipped

SEQ ID NO: 5280 - protein, 9 aa, synthetic construct
  REGION 1..9: note = anifrolumab light chain CDR3
QQYDSSAIT

SEQ ID NO: 5281 - protein, 119 aa, synthetic construct
  REGION 1..119: note = ansuvimab heavy chain V region
EVQLVESGGGLIQPGGSLRLSCAASGFALRMYDMHWVRQTIDKRLEWVSAVGPSGDTTYADSVKGRFAVSRENAKNSLSLQMNSLTAGDTAIYYCVRSDRGVAGLFDSWGQGILVTVSS

SEQ ID NO: 5282 - protein, 8 aa, synthetic construct
  REGION 1..8: note = ansuvimab heavy chain CDR1
GFALRMYD

SEQ ID NO: 5283 - protein, 7 aa, synthetic construct
  REGION 1..7: note = ansuvimab heavy chain CDR2
VGPSGDT

SEQ ID NO: 5284 - protein, 13 aa, synthetic construct
  REGION 1..13: note = ansuvimab heavy chain CDR3
VRSDRGVAGLFDS

SEQ ID NO: 5285 - protein, 107 aa, synthetic construct [sequence omitted]

SEQ ID NO: 5286 - protein, 6 aa, synthetic construct
  REGION 1..6: note = ansuvimab light chain CDR1
QAFDNY

SEQ ID NO: 5287 - skipped

SEQ ID NO: 5288 - protein, 9 aa, synthetic construct
  REGION 1..9: note = ansuvimab light chain CDR3
QNYNSAPLT

SEQ ID NO: 5289 - protein, 118 aa, synthetic construct
  REGION 1..118: note = anumigilimab heavy chain V region
EVQLLESGGGLVQPGGSLRLSCAASGFTFSLYWMGWVRQAPGKGLEWVSSISSSGGVTPYADSVKGRFTISRDNSKNTLYLQMNSLRAEDTAVYYCAKLGELGWFDPWGQGTLVTVSS

SEQ ID NO: 5290 - protein, 8 aa, synthetic construct
  REGION 1..8: note = anumigilimab heavy chain CDR1
GFTFSLYW

SEQ ID NO: 5291 - protein, 8 aa, synthetic construct
  REGION 1..8: note = anumigilimab heavy chain CDR2
ISSSGGVT

SEQ ID NO: 5292 - protein, 11 aa, synthetic construct
  REGION 1..11: note = anumigilimab heavy chain CDR3
AKLGELGWFDP

SEQ ID NO: 5293 - protein, 107 aa, synthetic construct
  REGION 1..107: note = anumigilimab light chain V region
DIQMTQSPSSLSASVGDRVTITCRASQGISSYLNWYQQKPGKAPKLLIYYASNLQNGVPSRFSGSGSGTDFTLTISSLQPEDFATYYCQQSYSTPLTFGGGTKVEIK

SEQ ID NO: 5294 - protein, 6 aa, synthetic construct
  REGION 1..6: note = anumigilimab light chain CDR1
QGISSY

SEQ ID NO: 5295 - skipped

SEQ ID NO: 5296 - protein, 9 aa, synthetic construct
  REGION 1..9: note = anumigilimab light chain CDR3
QQSYSTPLT

SEQ ID NO: 5297 - protein, 126 aa, synthetic construct
  REGION 1..126: note = apitegromab heavy chain V region
QVQLVESGGGVVQPGRSLRLSCAASGFTFSSYGMHWVRQAPGKGLEWVAVISYDGSNKYYADSVKGRFTISRDNSKNTLYLQMNSLRAEDTAVYYCARDLLVRFLEWSHYYGMDVWGQGTTVTVSS

SEQ ID NO: 5298 - protein, 8 aa, synthetic construct
  REGION 1..8: note = apitegromab heavy chain CDR1
GFTFSSYG

SEQ ID NO: 5299 - protein, 8 aa, synthetic construct
  REGION 1..8: note = apitegromab heavy chain CDR2
ISYDGSNK

SEQ ID NO: 5300 - protein, 19 aa, synthetic construct
  REGION 1..19: note = apitegromab heavy chain CDR3
ARDLLVRFLEWSHYYGMDV

SEQ ID NO: 5301 - protein, 109 aa, synthetic construct
  REGION 1..109: note = apitegromab light chain V region
QSVLTQPPSASGTPGQRVTISCSGSSSNIGSNTVHWYQQLPGTAPKLLIYSDNQRPSGVPDRFSGSKSGTSASLAISGLQSEDEADYYCAAWDDSLNGVFGGGTKLTVL

SEQ ID NO: 5302 - protein, 8 aa, synthetic construct
  REGION 1..8: note = apitegromab light chain CDR1
SSNIGSNT

SEQ ID NO: 5303 - skipped

SEQ ID NO: 5304 - protein, 10 aa, synthetic construct
  REGION 1..10: note = apitegromab light chain CDR3
AAWDDSLNGV

SEQ ID NO: 5305 - protein, 122 aa, synthetic construct
  REGION 1..122: note = aprutumab heavy chain V region
EVQLLESGGGLVQPGGSLRLSCAASGFTFSSYAMSWVRQAPGKGLEWVSAISGSGTSTYYADSVKGRFTISRDNSKNTLYLQMNSLRAEDTAVYYCARVRYNWNHGDWFDPWGQGTLVTVSS

SEQ ID NO: 5306 - protein, 8 aa, synthetic construct
  REGION 1..8: note = aprutumab heavy chain CDR1
GFTFSSYA

SEQ ID NO: 5307 - protein, 8 aa, synthetic construct
  REGION 1..8: note = aprutumab heavy chain CDR2
ISGSGTST

SEQ ID NO: 5308 - protein, 15 aa, synthetic construct
  REGION 1..15: note = aprutumab heavy chain CDR3
ARVRYNWNHGDWFDP

SEQ ID NO: 5309 - protein, 110 aa, synthetic construct
  REGION 1..110: note = aprutumab light chain V region
QSVLTQPPSASGTPGQRVTISCSGSSSNIGNNYVSWYQQLPGTAPKLLIYENYNRPAGVPDRFSGSKSGTSASLAISGLRSEDEADYYCSSWDDSLNYWVFGGGTKLTVL

SEQ ID NO: 5310 - protein, 8 aa, synthetic construct
  REGION 1..8: note = aprutumab light chain CDR1
SSNIGNNY

SEQ ID NO: 5311 - skipped

SEQ ID NO: 5312 - protein, 11 aa, synthetic construct
  REGION 1..11: note = aprutumab light chain CDR3
SSWDDSLNYWV

SEQ ID NO: 5313 - protein, 122 aa, synthetic construct; identical to SEQ ID NO: 5305
  REGION 1..122: note = aprutumab ixadotin heavy chain V region

SEQ ID NO: 5314 - protein, 8 aa, synthetic construct
  REGION 1..8: note = aprutumab ixadotin heavy chain CDR1
GFTFSSYA

SEQ ID NO: 5315 - protein, 8 aa, synthetic construct
  REGION 1..8: note = aprutumab ixadotin heavy chain CDR2
ISGSGTST

SEQ ID NO: 5316 - protein, 15 aa, synthetic construct
  REGION 1..15: note = aprutumab ixadotin heavy chain CDR3
ARVRYNWNHGDWFDP

SEQ ID NO: 5317 - protein, 110 aa, synthetic construct; identical to SEQ ID NO: 5309
  REGION 1..110: note = aprutumab ixadotin light chain V region

SEQ ID NO: 5318 - protein, 8 aa, synthetic construct
  REGION 1..8: note = aprutumab ixadotin light chain CDR1
SSNIGNNY

SEQ ID NO: 5319 - skipped

SEQ ID NO: 5320 - protein, 11 aa, synthetic construct
  REGION 1..11: note = aprutumab ixadotin light chain CDR3
SSWDDSLNYWV

SEQ ID NO: 5321 - protein, 118 aa, synthetic construct
  REGION 1..118: note = ascrinvacumab heavy chain V region
QVQLQESGPGLVKPSQTLSLTCTVSGGSISSGEYYWNWIRQHPGKGLEWIGYIYYSGSTYYNPSLKSRVTISVDTSKNQFSLKLSSVTAADTAVYYCARESVAGFDYWGQGTLVTVSS

SEQ ID NO: 5322 - protein, 10 aa, synthetic construct
  REGION 1..10: note = ascrinvacumab heavy chain CDR1
GGSISSGEYY

SEQ ID NO: 5323 - protein, 10 aa, synthetic construct
  REGION 1..10: note = ascrinvacumab heavy chain CDR2
IGYIYYSGST

SEQ ID NO: 5324 - protein, 10 aa, synthetic construct
  REGION 1..10: note = ascrinvacumab heavy chain CDR3
ARESVAGFDY

SEQ ID NO: 5325 - protein, 108 aa, synthetic construct
  REGION 1..108: note = ascrinvacumab light chain V region
EIVLTQSPGTLSLSPGERATLSCRASQSVSSSYLAWYQQKPGQAPRLLIYGTSSRATGIPDRFSGSGSGTDFTLTISRLEPEDFAVYYCQQYGSSPITFGQGTRLEIK

SEQ ID NO: 5326 - protein, 7 aa, synthetic construct
  REGION 1..7: note = ascrinvacumab light chain CDR1
QSVSSSY

SEQ ID NO: 5327 - skipped

SEQ ID NO: 5328 - protein, 9 aa, synthetic construct
  REGION 1..9: note = ascrinvacumab light chain CDR3
QQYGSSPIT

SEQ ID NO: 5329 - protein, 121 aa, synthetic construct
  REGION 1..121: note = astegolimab heavy chain V region
EVQLVQSGAEVKKPGESLKISCKGSGYSFTNYWIGWVRQMPGKGLEWMGIIYPGNSDTRFSPSFQGQVTISADKSITTAYLQWSSLKASDTAMYYCARHGTSSDYYGLDVWGQGTTVTVSS

SEQ ID NO: 5330 - protein, 8 aa, synthetic construct
  REGION 1..8: note = astegolimab heavy chain CDR1
GYSFTNYW

SEQ ID NO: 5331 - protein, 8 aa, synthetic construct
  REGION 1..8: note = astegolimab heavy chain CDR2
IYPGNSDT

SEQ ID NO: 5332 - protein, 14 aa, synthetic construct
  REGION 1..14: note = astegolimab heavy chain CDR3
ARHGTSSDYYGLDV

SEQ ID NO: 5333 - protein, 107 aa, synthetic construct
  REGION 1..107: note = astegolimab light chain V region
DIQMTQSPSSLSASVGDRVTITCQASQDISNYLNWYQQKPGKAPKLLIYDASNLETGVPSRFSGSGSGTDFTFTISSLQPEDIATYYCQQDDNFPLTFGGGTKVEIK

SEQ ID NO: 5334 - protein, 6 aa, synthetic construct
  REGION 1..6: note = astegolimab light chain CDR1
QDISNY

SEQ ID NO: 5335 - skipped

SEQ ID NO: 5336 - protein, 9 aa, synthetic construct
  REGION 1..9: note = astegolimab light chain CDR3
QQDDNFPLT

SEQ ID NO: 5337 - protein, 118 aa, synthetic construct [sequence omitted]

SEQ ID NO: 5338 - protein, 8 aa, synthetic construct
  REGION 1..8: note = atezolizumab heavy chain CDR1
GFTFSDSW

SEQ ID NO: 5339 - protein, 8 aa, synthetic construct
  REGION 1..8: note = atezolizumab heavy chain CDR2
ISPYGGST

SEQ ID NO: 5340 - protein, 11 aa, synthetic construct
  REGION 1..11: note = atezolizumab heavy chain CDR3
ARRHWPGGFDY

SEQ ID NO: 5341 - protein, 107 aa, synthetic construct [sequence omitted]

SEQ ID NO: 5342 - protein, 6 aa, synthetic construct
  REGION 1..6: note = atezolizumab light chain CDR1
QDVSTA

SEQ ID NO: 5343 - skipped

SEQ ID NO: 5344 - protein, 9 aa, synthetic construct
  REGION 1..9: note = atezolizumab light chain CDR3
QQYLYHPAT

SEQ ID NO: 5345 - protein, 119 aa, synthetic construct
  REGION 1..119: note = atidortoxumab heavy chain V region
EVQLQESGPGLVRPSETLSLTCAVSGYSISSGMGWGWIRQPPGKGLEWIGSIDQRGSTYYNPSLKSRVTISVDTSKNQFSLKLSSVTAADTAVYYCARDAGHAVDMDVWGKGTTVTVSS

SEQ ID NO: 5346 - protein, 9 aa, synthetic construct
  REGION 1..9: note = atidortoxumab heavy chain CDR1
GYSISSGMG

SEQ ID NO: 5347 - protein, 10 aa, synthetic construct
  REGION 1..10: note = atidortoxumab heavy chain CDR2
IGSIDQRGST

SEQ ID NO: 5348 - protein, 9 aa, synthetic construct
  REGION 1..9: note = atidortoxumab heavy chain CDR3
AGHAVDMDV

SEQ ID NO: 5349 - protein, 107 aa, synthetic construct
  REGION 1..107: note = atidortoxumab light chain V region
DIQMTQSPSSVSASVGDRVTITCRASQGISRWLAWYQQKPGKAPKLLIYAASSLQSGVPSRFSGSGSGTDFTLTISSLQPEDFATYYCQQGYVFPLTFGGGTKVEIK

SEQ ID NO: 5350 - protein, 6 aa, synthetic construct
  REGION 1..6: note = atidortoxumab light chain CDR1
QGISRW

SEQ ID NO: 5351 - skipped

SEQ ID NO: 5352 - protein, 9 aa, synthetic construct
  REGION 1..9: note = atidortoxumab light chain CDR3
QQGYVFPLT

SEQ ID NO: 5353 - protein, 114 aa, synthetic construct
  REGION 1..114: note = atinumab heavy chain V region
EVQLVESGGGLVQPGGSLRLSCAASGFTFSNYWMSWVRQAPGKGLEWVATIKQDGSQKNYVDSVKGRFTISRDNAKNSLYLRLNSLRAEDTAVYYCATELFDLWGRGSLVTVSS

SEQ ID NO: 5354 - protein, 8 aa, synthetic construct
  REGION 1..8: note = atinumab heavy chain CDR1
GFTFSNYW

SEQ ID NO: 5355 - protein, 8 aa, synthetic construct
  REGION 1..8: note = atinumab heavy chain CDR2
IKQDGSQK

SEQ ID NO: 5356 - protein, 7 aa, synthetic construct
  REGION 1..7: note = atinumab heavy chain CDR3
ATELFDL

SEQ ID NO: 5357 - protein, 107 aa, synthetic construct
  REGION 1..107: note = atinumab light chain V region
EIVLTQSPATLSLSPGERATLSCRASQSVSSYLAWYQQKPGQAPRLLIYDASNRATGIPARFSGSGSGTDFTLTISSLEPEDFAVYYCQQRSNWPITFGQGTKLEIK

SEQ ID NO: 5358 - protein, 6 aa, synthetic construct
  REGION 1..6: note = atinumab light chain CDR1
QSVSSY

SEQ ID NO: 5359 - skipped

SEQ ID NO: 5360 - protein, 9 aa, synthetic construct
  REGION 1..9: note = atinumab light chain CDR3
QQRSNWPIT

SEQ ID NO: 5361 - protein, 116 aa, synthetic construct
  REGION 1..116: note = atoltivimab heavy chain V region
QVQLVESGGGVVQPGRSLRLSCAASGFTFNNYGMHWVRQAPGMGLEWVAVIWHDGSDKYYADSVKGRFTISRDNSKNTLYLQMNSLRAEDTAVYYCARNWNLFDYWGQGTLVTVSS

SEQ ID NO: 5362 - protein, 8 aa, synthetic construct
  REGION 1..8: note = atoltivimab heavy chain CDR1
GFTFNNYG

SEQ ID NO: 5363 - protein, 8 aa, synthetic construct
  REGION 1..8: note = atoltivimab heavy chain CDR2
IWHDGSDK

SEQ ID NO: 5364 - protein, 9 aa, synthetic construct
  REGION 1..9: note = atoltivimab heavy chain CDR3
ARNWNLFDY

SEQ ID NO: 5365 - protein, 108 aa, synthetic construct
  REGION 1..108: note = atoltivimab light chain V region
DIQMTQSPSSLSASVGDRITITCRASQSISTYLHWYQQKPGKAPKLLIYAASTLQSGVPSRFSGSGSGTDFTLTISSLQPEDFATYYCQQSFSTPPINFGQGTKLEIK

SEQ ID NO: 5366 - protein, 6 aa, synthetic construct
  REGION 1..6: note = atoltivimab light chain CDR1
QSISTY

SEQ ID NO: 5367 - skipped

SEQ ID NO: 5368 - protein, 10 aa, synthetic construct
  REGION 1..10: note = atoltivimab light chain CDR3
QQSFSTPPIN

SEQ ID NO: 5369 - protein, 124 aa, synthetic construct
  REGION 1..124: note = avdoralimab heavy chain V region
EVQLVESGGGLVQPGGSLRLSCAASGFTFSSYVMHWVRQATGKGLEWVSAIDTGGGTYYADSVKGRFTISRENAKNSLYLQMNSLRAGDTAVYYCARDYYYYASGSYYKAFDIWGQGTMVTVSS

SEQ ID NO: 5370 - protein, 8 aa, synthetic construct
  REGION 1..8: note = avdoralimab heavy chain CDR1
GFTFSSYV

SEQ ID NO: 5371 - protein, 7 aa, synthetic construct
  REGION 1..7: note = avdoralimab heavy chain CDR2
IDTGGGT

SEQ ID NO: 5372 - protein, 11 aa, synthetic construct
  REGION 1..11: note = avdoralimab heavy chain CDR3
ASGSYYKAFDI

SEQ ID NO: 5373 - protein, 107 aa, synthetic construct
  REGION 1..107: note = avdoralimab light chain V region
EIVLTQSPGTLSLSPGERATLSCRASQSVSSRYLAWYQQKPGQAPRLLIYGASSRATGIPDRFSGSGSGTDFTLTISRLEPEDFAVYYCQQYGSPLTFGQGTKLEIK

SEQ ID NO: 5374 - protein, 7 aa, synthetic construct
  REGION 1..7: note = avdoralimab light chain CDR1
QSVSSRY

SEQ ID NO: 5375 - skipped

SEQ ID NO: 5376 - protein, 8 aa, synthetic construct
  REGION 1..8: note = avdoralimab light chain CDR3
QQYGSPLT

SEQ ID NO: 5377 - protein, 120 aa, synthetic construct
  REGION 1..120: note = avelumab heavy chain V region
EVQLLESGGGLVQPGGSLRLSCAASGFTFSSYIMMWVRQAPGKGLEWVSSIYPSGGITFYADTVKGRFTISRDNSKNTLYLQMNSLRAEDTAVYYCARIKLGTVTTVDYWGQGTLVTVSS

SEQ ID NO: 5378 - protein, 8 aa, synthetic construct
  REGION 1..8: note = avelumab heavy chain CDR1
GFTFSSYI

SEQ ID NO: 5379 - protein, 8 aa, synthetic construct
  REGION 1..8: note = avelumab heavy chain CDR2
IYPSGGIT

SEQ ID NO: 5380 - protein, 13 aa, synthetic construct
  REGION 1..13: note = avelumab heavy chain CDR3
ARIKLGTVTTVDY

SEQ ID NO: 5381 - protein, 110 aa, synthetic construct
  REGION 1..110: note = avelumab light chain V region
QSALTQPASVSGSPGQSITISCTGTSSDVGGYNYVSWYQQHPGKAPKLMIYDVSNRPSGVSNRFSGSKSGNTASLTISGLQAEDEADYYCSSYTSSSTRVFGTGTKVTVL

SEQ ID NO: 5382 - protein, 9 aa, synthetic construct
  REGION 1..9: note = avelumab light chain CDR1
SSDVGGYNY

SEQ ID NO: 5383 - skipped

SEQ ID NO: 5384 - protein, 10 aa, synthetic construct
  REGION 1..10: note = avelumab light chain CDR3
SSYTSSSTRV

SEQ ID NO: 5385 - protein, 113 aa, synthetic construct
  REGION 1..113: note = balstilimab heavy chain V region
QVQLVESGGGVVQPGRSLRLSCAASGFTFSSYGMHWVRQAPGKGLEWVAVIWYDGSNKYYADSVKGRFTISRDNSKNTLYLQMNSLRAEDTAVYYCASNGDHWGQGTLVTVSS

SEQ ID NO: 5386 - protein, 8 aa, synthetic construct
  REGION 1..8: note = balstilimab heavy chain CDR1
GFTFSSYG

SEQ ID NO: 5387 - protein, 8 aa, synthetic construct
  REGION 1..8: note = balstilimab heavy chain CDR2
IWYDGSNK

SEQ ID NO: 5388 - protein, 6 aa, synthetic construct
  REGION 1..6: note = balstilimab heavy chain CDR3
ASNGDH

SEQ ID NO: 5389 - protein, 107 aa, synthetic construct
  REGION 1..107: note = balstilimab light chain V region
EIVMTQSPATLSVSPGERATLSCRASQSVSSNLAWYQQKPGQAPRLLIYGASTRATGIPARFSGSGSGTEFTLTISSLQSEDFAVYYCQQYNNWPRTFGQGTKVEIK

SEQ ID NO: 5390 - protein, 6 aa, synthetic construct
  REGION 1..6: note = balstilimab light chain CDR1
QSVSSN

SEQ ID NO: 5391 - skipped

SEQ ID NO: 5392 - protein, 9 aa, synthetic construct
  REGION 1..9: note = balstilimab light chain CDR3
QQYNNWPRT

SEQ ID NO: 5393 - protein, 125 aa, synthetic construct; identical to SEQ ID NO: 440
  REGION 1..125: note = bamlanivimab heavy chain V region

SEQ ID NO: 5394 - protein, 8 aa, synthetic construct
  REGION 1..8: note = bamlanivimab heavy chain CDR1
GGTFSNYA

SEQ ID NO: 5395 - protein, 9 aa, synthetic construct
  REGION 1..9: note = bamlanivimab heavy chain CDR2
IIPILGIAN

SEQ ID NO: 5396 - protein, 18 aa, synthetic construct
  REGION 1..18: note = bamlanivimab heavy chain CDR3
ARGYYEARHYYYYYAMDV

SEQ ID NO: 5397 - protein, 107 aa, synthetic construct; identical to SEQ ID NO: 439
  REGION 1..107: note = bamlanivimab light chain V region

SEQ ID NO: 5398 - protein, 6 aa, synthetic construct
  REGION 1..6: note = bamlanivimab light chain CDR1
QSISSY

SEQ ID NO: 5399 - skipped

SEQ ID NO: 5400 - protein, 9 aa, synthetic construct
  REGION 1..9: note = bamlanivimab light chain CDR3
QQSYSTPRT

SEQ ID NO: 5401 - protein, 120 aa, synthetic construct
  REGION 1..120: note = bapotulimab heavy chain V region
QVQLVQSGAEVKKPGSSVKVSCKASGGTFSSYAISWVRQAPGQGLEWMGGIIPILGIANYAQKFQGRVTITADKSTSTAYMELSSLRSEDTAVYYCARGRLPYGDFWDSWGQGTLVTVSS

SEQ ID NO: 5402 - protein, 8 aa, synthetic construct
  REGION 1..8: note = bapotulimab heavy chain CDR1
GGTFSSYA

SEQ ID NO: 5403 - protein, 8 aa, synthetic construct
  REGION 1..8: note = bapotulimab heavy chain CDR2
IIPILGIA

SEQ ID NO: 5404 - protein, 13 aa, synthetic construct
  REGION 1..13: note = bapotulimab heavy chain CDR3
ARGRLPYGDFWDS

SEQ ID NO: 5405 - protein, 112 aa, synthetic construct
  REGION 1..112: note = bapotulimab light chain V region
DIVMTQSPLSLPVTPGEPASISCRSSQSLLYSNGYNYLDWYLQKPGQSPQLLIYLGSNRASGVPDRFSGSGSGTDFTLKISRVEAEDVGVYYCMQALQTPLTFGGGTKLEIR

SEQ ID NO: 5406 - protein, 11 aa, synthetic construct
  REGION 1..11: note = bapotulimab light chain CDR1
QSLLYSNGYNY

SEQ ID NO: 5407 - skipped

SEQ ID NO: 5408 - protein, 9 aa, synthetic construct
  REGION 1..9: note = bapotulimab light chain CDR3
MQALQTPLT

SEQ ID NO: 5409 - protein, 121 aa, synthetic construct
  REGION 1..121: note = barecetamab heavy chain V region
EVQLLESGGGLVQPGGSLRLSCAASGFTFSDYDMSWVRQAPGKGLEWVSTIDLDSGSIYYADSVQGRFTISRDNSKNTLYLQMNSLRAEDTAVYYCAKDLHMGPEGPFDYWGQGTLVTVSS

SEQ ID NO: 5410 - protein, 8 aa, synthetic construct
  REGION 1..8: note = barecetamab heavy chain CDR1
GFTFSDYD

SEQ ID NO: 5411 - protein, 8 aa, synthetic construct
  REGION 1..8: note = barecetamab heavy chain CDR2
IDLDSGSI

SEQ ID NO: 5412 - protein, 14 aa, synthetic construct
  REGION 1..14: note = barecetamab heavy chain CDR3
AKDLHMGPEGPFDY

SEQ ID NO: 5413 - protein, 110 aa, synthetic construct
  REGION 1..110: note = barecetamab light chain V region
QSVLTQPPSASGTPGQRVTISCSGSSSNIGSNSVSWYQQLPGTAPKLLIYSDNHRPSGVPDRFSGSKSGTSASLAISGLRSEDEADYYCQGWDTSLSGHVFGGGTKLTVL

SEQ ID NO: 5414 - protein, 8 aa, synthetic construct
  REGION 1..8: note = barecetamab light chain CDR1
SSNIGSNS

SEQ ID NO: 5415 - skipped

SEQ ID NO: 5416 - protein, 11 aa, synthetic construct
  REGION 1..11: note = barecetamab light chain CDR3
QGWDTSLSGHV

SEQ ID NO: 5417 - protein, 121 aa, synthetic construct
  REGION 1..121: note = batoclimab heavy chain V region
QLLLQESGPGLVKPSETLSLTCTVSGGSLSSSFSYWVWIRQPPGKGLEWIGTIYYSGNTYYNPSLKSRLTISVDTSKNHFSLKLSSVTAADTAVYYCARRAGILTGYLDSWGQGTLVTVSS

SEQ ID NO: 5418 - protein, 10 aa, synthetic construct
  REGION 1..10: note = batoclimab heavy chain CDR1
GGSLSSSFSY

SEQ ID NO: 5419 - protein, 8 aa, synthetic construct
  REGION 1..8: note = batoclimab heavy chain CDR2
TIYYSGNT

SEQ ID NO: 5420 - protein, 13 aa, synthetic construct
  REGION 1..13: note = batoclimab heavy chain CDR3
ARRAGILTGYLDS

SEQ ID NO: 5421 - protein, 108 aa, synthetic construct
  REGION 1..108: note = batoclimab light chain V region
SYVLTQSPSVSVAPGQTARITCGGNNIGSKSVHWYQQKPGQAPVLVVYDDSDRPSGIPERFSASNSGNTATLTISRVEAGDEADYYCQVWDSSSDHVVFGGGTKLTVL

SEQ ID NO: 5422 - protein, 6 aa, synthetic construct
  REGION 1..6: note = batoclimab light chain CDR1
NIGSKS

SEQ ID NO: 5423 - skipped

SEQ ID NO: 5424 - protein, 11 aa, synthetic construct
  REGION 1..11: note = batoclimab light chain CDR3
QVWDSSSDHVV

SEQ ID NO: 5425 - protein, 117 aa, synthetic construct
  REGION 1..117: note = befovacimab heavy chain V region
EVQLVESGGGLVQPGGSLRLSCAASGFTFSSYGMDWVRQAPGKGLEWVSSIRGSRGSTYYADSVKGRFTISRDNSKNTLYLQMNSLRAEDTAVYYCARLYRYWFDYWGQGTLVTVSS

SEQ ID NO: 5426 - protein, 8 aa, synthetic construct
  REGION 1..8: note = befovacimab heavy chain CDR1
GFTFSSYG

SEQ ID NO: 5427 - protein, 8 aa, synthetic construct
  REGION 1..8: note = befovacimab heavy chain CDR2
IRGSRGST

SEQ ID NO: 5428 - protein, 10 aa, synthetic construct
  REGION 1..10: note = befovacimab heavy chain CDR3
ARLYRYWFDY

SEQ ID NO: 5429 - protein, 106 aa, synthetic construct
  REGION 1..106: note = befovacimab light chain V region
SYELTQPPSVSVSPGQTARITCSGDNLPKYYAHWYQQKPGQAPVVVIFYDVNRPSGIPERFSGSNSGNTATLTISGTQAMDEADYYCQAWWSSTPVFGGGTKLTVL

SEQ ID NO: 5430 - protein, 6 aa, synthetic construct
  REGION 1..6: note = befovacimab light chain CDR1
NLPKYY

SEQ ID NO: 5431 - skipped

SEQ ID NO: 5432 - protein, 8 aa, synthetic construct
  REGION 1..8: note = befovacimab light chain CDR3
AWWSSTPV

SEQ ID NO: 5433 - protein, 121 aa, synthetic construct
  REGION 1..121: note = belantamab heavy chain V region
QVQLVQSGAEVKKPGSSVKVSCKASGGTFSNYWMHWVRQAPGQGLEWMGATYRGHSDTYYNQKFKGRVTITADKSTSTAYMELSSLRSEDTAVYYCARGAIYDGYDVLDNWGQGTLVTVSS

SEQ ID NO: 5434 - protein, 8 aa, synthetic construct
  REGION 1..8: note = belantamab heavy chain CDR1
GGTFSNYW

SEQ ID NO: 5435 - protein, 8 aa, synthetic construct
  REGION 1..8: note = belantamab heavy chain CDR2
TYRGHSDT

SEQ ID NO: 5436 - protein, 14 aa, synthetic construct
  REGION 1..14: note = belantamab heavy chain CDR3
ARGAIYDGYDVLDN

SEQ ID NO: 5437 - protein, 107 aa, synthetic construct
  REGION 1..107: note = belantamab light chain V region
DIQMTQSPSSLSASVGDRVTITCSASQDISNYLNWYQQKPGKAPKLLIYYTSNLHSGVPSRFSGSGSGTDFTLTISSLQPEDFATYYCQQYRKLPWTFGQGTKLEIK

SEQ ID NO: 5438 - protein, 6 aa, synthetic construct
  REGION 1..6: note = belantamab light chain CDR1
QDISNY

SEQ ID NO: 5439 - skipped

SEQ ID NO: 5440 - protein, 9 aa, synthetic construct
  REGION 1..9: note = belantamab light chain CDR3
QQYRKLPWT

SEQ ID NO: 5441 - protein, 123 aa, synthetic construct
  REGION 1..123: note = belimumab heavy chain V region
QVQLQQSGAEVKKPGSSVRVSCKASGGTFNNNAINWVRQAPGQGLEWMGGIIPMFGTAKYSQNFQGRVAITADESTGTASMELSSLRSEDTAVYYCARSRDLLLFPHHALSPWGRGTMVTVSS

SEQ ID NO: 5442 - protein, 8 aa, synthetic construct
  REGION 1..8: note = belimumab heavy chain CDR1
GGTFNNNA

SEQ ID NO: 5443 - protein, 8 aa, synthetic construct
  REGION 1..8: note = belimumab heavy chain CDR2
IIPMFGTA

SEQ ID NO: 5444 - protein, 16 aa, synthetic construct
  REGION 1..16: note = belimumab heavy chain CDR3
ARSRDLLLFPHHALSP

SEQ ID NO: 5445 - protein, 108 aa, synthetic construct
  REGION 1..108: note = belimumab light chain V region
SSELTQDPAVSVALGQTVRVTCQGDSLRSYYASWYQQKPGQAPVLVIYGKNNRPSGIPDRFSGSSSGNTASLTITGAQAEDEADYYCSSRDSSGNHWVFGGGTELTVL

SEQ ID NO: 5446 - protein, 6 aa, synthetic construct
  REGION 1..6: note = belimumab light chain CDR1
SLRSYY

SEQ ID NO: 5447 - skipped

SEQ ID NO: 5448 - protein, 11 aa, synthetic construct
  REGION 1..11: note = belimumab light chain CDR3
SSRDSSGNHWV

SEQ ID NO: 5449 - protein, 121 aa, synthetic construct [sequence omitted]

SEQ ID NO: 5450 - protein, 8 aa, synthetic construct
  REGION 1..8: note = benralizumab heavy chain CDR1
GYTFTSYV

SEQ ID NO: 5451 - protein, 8 aa, synthetic construct
  REGION 1..8: note = benralizumab heavy chain CDR2
INPYNDGT

SEQ ID NO: 5452 - protein, 14 aa, synthetic construct
  REGION 1..14: note = benralizumab heavy chain CDR3
GREGIRYYGLLGDY

SEQ ID NO: 5453 - protein, 107 aa, synthetic construct [sequence omitted]

SEQ ID NO: 5454 - protein, 6 aa, synthetic construct
  REGION 1..6: note = benralizumab light chain CDR1
EDIINY

SEQ ID NO: 5455 - skipped

SEQ ID NO: 5456 - protein, 9 aa, synthetic construct
  REGION 1..9: note = benralizumab light chain CDR3
QQGYTLPYT

SEQ ID NO: 5457 - protein, 128 aa, synthetic construct
  REGION 1..128: note = bentracimab heavy chain V region
QVQLQESGAEVKKPGSSVRVSCKASGGTFDSYSIHWVRQAPGQGLEWMGGIIPAFGTLSSAQDFQARVTISADKSTSTAYMELSGLRSEDTAVYYCARGSFDYYFWSASHPPNDALAIWGQGTLVTVS

SEQ ID NO: 5458 - protein, 8 aa, synthetic construct
  REGION 1..8: note = bentracimab heavy chain CDR1
GGTFDSYS

SEQ ID NO: 5459 - protein, 8 aa, synthetic construct
  REGION 1..8: note = bentracimab heavy chain CDR2
IIPAFGTL

SEQ ID NO: 5460 - protein, 22 aa, synthetic construct
  REGION 1..22: note = bentracimab heavy chain CDR3
ARGSFDYYFWSASHPPNDALAI

SEQ ID NO: 5461 - protein, 110 aa, synthetic construct
  REGION 1..110: note = bentracimab light chain V region
QSVVTQPPSVSAAPGQKVTISCSGSNSDIGNNYVSWYQQLPGTAPKLLIYDNNKRPSGIPDRFSGSKSGTSATLAITGLQAGDEADYYCGTWLYDRAVGLFGGGTKVTVL

SEQ ID NO: 5462 - protein, 8 aa, synthetic construct
  REGION 1..8: note = bentracimab light chain CDR1
NSDIGNNY

SEQ ID NO: 5463 - skipped

SEQ ID NO: 5464 - protein, 11 aa, synthetic construct
  REGION 1..11: note = bentracimab light chain CDR3
GTWLYDRAVGL

SEQ ID NO: 5465 - protein, 119 aa, synthetic construct
  REGION 1..119: note = berlimatoxumab heavy chain V region
ELQLQESGPGLVKPSETLSLTCTVSGGSISSGSYYWDWIRQPPGKGLEWIGNIYKSGSTYYNPSLKSRVTISVDTSKNQFSLKLSSVTAADTAVYYCARERGMHYMDVWGKGTTVTVSS

SEQ ID NO: 5466 - protein, 10 aa, synthetic construct
  REGION 1..10: note = berlimatoxumab heavy chain CDR1
GGSISSGSYY

SEQ ID NO: 5467 - protein, 7 aa, synthetic construct
  REGION 1..7: note = berlimatoxumab heavy chain CDR2
IYKSGST

SEQ ID NO: 5468 - protein, 11 aa, synthetic construct
  REGION 1..11: note = berlimatoxumab heavy chain CDR3
ARERGMHYMDV

SEQ ID NO: 5469 - protein, 107 aa, synthetic construct
  REGION 1..107: note = berlimatoxumab light chain V region
DIQMTQSPSSLSASVGDRVTITCRASQSINSYLNWYQQKPGKAPKLLIYAASSLQSGVPSRFSGSGSGTDFTLTISSLQPEDFATYYCQQQFDPPFTFGGGTKVEIK

SEQ ID NO: 5470 - protein, 6 aa, synthetic construct
  REGION 1..6: note = berlimatoxumab light chain CDR1
QSINSY

SEQ ID NO: 5471 - skipped

SEQ ID NO: 5472 - protein, 8 aa, synthetic construct
  REGION 1..8: note = berlimatoxumab light chain CDR3
QQFDPPFT

SEQ ID NO: 5473 - protein, 117 aa, synthetic construct
  REGION 1..117: note = bersanlimab heavy chain V region
EVQLLESGGGLVQPGGSLRLSCAASGFTFSNAWMSWVRQAPGKGLEWVAFIWYDGSNKYYADSVKGRFTISRDNSKNTLYLQMNSLRAEDTAVYYCARYSGWYFDYWGQGTLVTVSS

SEQ ID NO: 5474 - protein, 8 aa, synthetic construct
  REGION 1..8: note = bersanlimab heavy chain CDR1
GFTFSNAW

SEQ ID NO: 5475 - protein, 8 aa, synthetic construct
  REGION 1..8: note = bersanlimab heavy chain CDR2
IWYDGSNK

SEQ ID NO: 5476 - protein, 10 aa, synthetic construct
  REGION 1..10: note = bersanlimab heavy chain CDR3
ARYSGWYFDY

SEQ ID NO: 5477 - protein, 111 aa, synthetic construct
  REGION 1..111: note = bersanlimab light chain V region
QSVLTQPPSASGTPGQRVTISCTGSSSNIGAGYDVHWYQQLPGTAPKLLIYDNNNRPSGVPDRFSGSKSGTSASLAISGLRSEDEADYYCQSYDSSLSAWLFGGGTKLTVL

SEQ ID NO: 5478 - protein, 9 aa, synthetic construct
  REGION 1..9: note = bersanlimab light chain CDR1
SSNIGAGYD

SEQ ID NO: 5479 - skipped

SEQ ID NO: 5480 - protein, 10 aa, synthetic construct
  REGION 1..10: note = bersanlimab light chain CDR3
QSYDSSLSAW

SEQ ID NO: 5481 - protein, 123 aa, synthetic construct [sequence omitted]

SEQ ID NO: 5482 - protein, 8 aa, synthetic construct
  REGION 1..8: note = bevacizumab heavy chain CDR1
GYTFTNYG

SEQ ID NO: 5483 - protein, 8 aa, synthetic construct
  REGION 1..8: note = bevacizumab heavy chain CDR2
INTYTGEP

SEQ ID NO: 5484 - protein, 16 aa, synthetic construct
  REGION 1..16: note = bevacizumab heavy chain CDR3
AKYPHYYGSSHWYFDV

SEQ ID NO: 5485 - protein, 107 aa, synthetic construct [sequence omitted]

SEQ ID NO: 5486 - protein, 6 aa, synthetic construct
  REGION 1..6: note = bevacizumab light chain CDR1
QDISNY

SEQ ID NO: 5487 - skipped

SEQ ID NO: 5488 - protein, 9 aa, synthetic construct
  REGION 1..9: note = bevacizumab light chain CDR3
QQYSTVPWT

SEQ ID NO: 5489 - protein, 119 aa, synthetic construct
  REGION 1..119: note = bezlotoxumab heavy chain V region
EVQLVQSGAEVKKSGESLKISCKGSGYSFTSYWIGWVRQMPGKGLEWMGIFYPGDSSTRYSPSFQGQVTISADKSVNTAYLQWSSLKASDTAMYYCARRRNWGNAFDIWGQGTMVTVSS

SEQ ID NO: 5490 - protein, 7 aa, synthetic construct
  REGION 1..7: note = bezlotoxumab heavy chain CDR1
YSFTSYW

SEQ ID NO: 5491 - protein, 9 aa, synthetic construct
  REGION 1..9: note = bezlotoxumab heavy chain CDR2
IFYPGDSST

SEQ ID NO: 5492 - protein, 12 aa, synthetic construct
  REGION 1..12: note = bezlotoxumab heavy chain CDR3
ARRRNWGNAFDI

SEQ ID NO: 5493 - protein, 108 aa, synthetic construct
  REGION 1..108: note = bezlotoxumab light chain V region
EIVLTQSPGTLSLSPGERATLSCRASQSVSSSYLAWYQQKPGQAPRLLIYGASSRATGIPDRFSGSGSGTDFTLTISRLEPEDFAVYYCQQYGSSTWTFGQGTKVEIK

SEQ ID NO: 5494 - protein, 7 aa, synthetic construct
  REGION 1..7: note = bezlotoxumab light chain CDR1
QSVSSSY

SEQ ID NO: 5495 - skipped

SEQ ID NO: 5496 - protein, 9 aa, synthetic construct
  REGION 1..9: note = bezlotoxumab light chain CDR3
QQYGSSTWT

SEQ ID NO: 5497 - protein, 115 aa, synthetic construct [sequence omitted]

SEQ ID NO: 5498 - protein, 8 aa, synthetic construct
  REGION 1..8: note = bimagrumab heavy chain CDR1
GYTFTSSY

SEQ ID NO: 5499 - protein, 8 aa, synthetic construct
  REGION 1..8: note = bimagrumab heavy chain CDR2
INPVSGST

SEQ ID NO: 5500 - protein, 8 aa, synthetic construct
  REGION 1..8: note = bimagrumab heavy chain CDR3
ARGGWFDY

SEQ ID NO: 5501 - protein, 111 aa, synthetic construct [sequence omitted]

SEQ ID NO: 5502 - protein, 9 aa, synthetic construct
  REGION 1..9: note = bimagrumab light chain CDR1
SSDVGSYNY

SEQ ID NO: 5503 - skipped

SEQ ID NO: 5504 - protein, 11 aa, synthetic construct
  REGION 1..11: note = bimagrumab light chain CDR3
GTFAGGSYYGV

SEQ ID NO: 5505 - protein, 125 aa, synthetic construct
  REGION 1..125: note = bimekizumab heavy chain V region
EVQLVESGGGLVQPGGSLRLSCAASGFTFSDYNMAWVRQAPGKGLEWVATITYEGRNTYYRDSVKGRFTISRDNAKNSLYLQMNSLRAEDTAVYYCASPPQYYEGSIYRLWFAHWGQGTLVTVSS

SEQ ID NO: 5506 - protein, 8 aa, synthetic construct
  REGION 1..8: note = bimekizumab heavy chain CDR1
GFTFSDYN

SEQ ID NO: 5507 - protein, 8 aa, synthetic construct
  REGION 1..8: note = bimekizumab heavy chain CDR2
ITYEGRNT

SEQ ID NO: 5508 - protein, 18 aa, synthetic construct
  REGION 1..18: note = bimekizumab heavy chain CDR3
ASPPQYYEGSIYRLWFAH

SEQ ID NO: 5509 - protein, 107 aa, synthetic construct
  REGION 1..107: note = bimekizumab light chain V region
AIQLTQSPSSLSASVGDRVTITCRADESVRTLMHWYQQKPGKAPKLLIYLVSNSEIGVPDRFSGSGSGTDFRLTISSLQPEDFATYYCQQTWSDPWTFGQGTKVEIK

SEQ ID NO: 5510 - protein, 6 aa, synthetic construct
  REGION 1..6: note = bimekizumab light chain CDR1
ESVRTL

SEQ ID NO: 5511 - skipped

SEQ ID NO: 5512 - protein, 9 aa, synthetic construct
  REGION 1..9: note = bimekizumab light chain CDR3
QQTWSDPWT

SEQ ID NO: 5513 - protein, 120 aa, synthetic construct; identical to SEQ ID NO: 5377
  REGION 1..120: note = bintrafusp alfa heavy chain V region

SEQ ID NO: 5514 - protein, 8 aa, synthetic construct
  REGION 1..8: note = bintrafusp alfa heavy chain CDR1
GFTFSSYI

SEQ ID NO: 5515 - protein, 8 aa, synthetic construct
  REGION 1..8: note = bintrafusp alfa heavy chain CDR2
IYPSGGIT

SEQ ID NO: 5516 - protein, 13 aa, synthetic construct
  REGION 1..13: note = bintrafusp alfa heavy chain CDR3
ARIKLGTVTTVDY

SEQ ID NO: 5517 - protein, 110 aa, synthetic construct; identical to SEQ ID NO: 5381
  REGION 1..110: note = bintrafusp alfa light chain V region

SEQ ID NO: 5518 - protein, 9 aa, synthetic construct
  REGION 1..9: note = bintrafusp alfa light chain CDR1
SSDVGGYNY

SEQ ID NO: 5519 - skipped

SEQ ID NO: 5520 - protein, 11 aa, synthetic construct
  REGION 1..11: note = bintrafusp alfa light chain CDR3
SSYTSSSTRVF

SEQ ID NO: 5521 - protein, 121 aa, synthetic construct
  REGION 1..121: note = bleselumab heavy chain V region
QLQLQESGPGLLKPSETLSLTCTVSGGSISSPGYYGGWIRQPPGKGLEWIGSIYKSGSTYHNPSLKSRVTISVDTSKNQFSLKLSSVTAADTAVYYCTRPVVRYFGWFDPWGQGTLVTVSS

SEQ ID NO: 5522 - protein, 9 aa, synthetic construct
  REGION 1..9: note = bleselumab heavy chain CDR1
GGSISSPGY

SEQ ID NO: 5523 - protein, 7 aa, synthetic construct
  REGION 1..7: note = bleselumab heavy chain CDR2
IYKSGST

SEQ ID NO: 5524 - protein, 13 aa, synthetic construct
  REGION 1..13: note = bleselumab heavy chain CDR3
TRPVVRYFGWFDP

SEQ ID NO: 5525 - protein, 106 aa, synthetic construct
  REGION 1..106: note = bleselumab light chain V region
AIQLTQSPSSLSASVGDRVTITCRASQGISSALAWYQQKPGKAPKLLIYDASNLESGVPSRFSGSGSGTDFTLTISSLQPEDFATYYCQQFNSYPTFGQGTKVEIK

SEQ ID NO: 5526 - protein, 6 aa, synthetic construct
  REGION 1..6: note = bleselumab light chain CDR1
QGISSA

SEQ ID NO: 5527 - skipped

SEQ ID NO: 5528 - protein, 8 aa, synthetic construct
  REGION 1..8: note = bleselumab light chain CDR3
QQFNSYPT

SEQ ID NO: 5529 - protein, 118 aa, synthetic construct
  REGION 1..118: note = botensilimab heavy chain V region
EVQLVESGGGLVKPGGSLRLSCAASGFTFSSYSMNWVRQAPGKGLEWVSSISSSSSYIYYAESVKGRFTISRDNAKNSLYLQMNSLRAEDTAVYYCARVGLFGPFDIWGQGTLVTVSS

SEQ ID NO: 5530 - protein, 8 aa, synthetic construct
  REGION 1..8: note = botensilimab heavy chain CDR1
GFTFSSYS

SEQ ID NO: 5531 - protein, 8 aa, synthetic construct
  REGION 1..8: note = botensilimab heavy chain CDR2
ISSSSSYI

SEQ ID NO: 5532 - protein, 11 aa, synthetic construct
  REGION 1..11: note = botensilimab heavy chain CDR3
ARVGLFGPFDI

SEQ ID NO: 5533 - protein, 107 aa, synthetic construct
  REGION 1..107: note = botensilimab light chain V region
EIVLTQSPGTLSLSPGERATLSCRASQSVSRYLGWYQQKPGQAPRLLIYGASTRATGIPDRFSGSGSGTDFTLTITRLEPEDFAVYYCQQYGSSPWTFGQGTKVEIK

SEQ ID NO: 5534 - protein, 6 aa, synthetic construct
  REGION 1..6: note = botensilimab light chain CDR1
QSVSRY

SEQ ID NO: 5535 - skipped

SEQ ID NO: 5536 - protein, 9 aa, synthetic construct
  REGION 1..9: note = botensilimab light chain CDR3
QQYGSSPWT

SEQ ID NO: 5537 - protein, 124 aa, synthetic construct
  REGION 1..124: note = brazikumab heavy chain V region
QVQLVESGGGVVQPGRSLRLSCAASGFTFSSYGMHWVRQAPGKGLEWVAVIWYDGSNEYYADSVKGRFTISRDNSKNTLYLQMNSLRAEDTAVYYCARDRGYTSSWYPDAFDIWGQGTMVTVSS

SEQ ID NO: 5538 - protein, 8 aa, synthetic construct
  REGION 1..8: note = brazikumab heavy chain CDR1
GFTFSSYG

SEQ ID NO: 5539 - protein, 8 aa, synthetic construct
  REGION 1..8: note = brazikumab heavy chain CDR2
IWYDGSNE

SEQ ID NO: 5540 - protein, 17 aa, synthetic construct
  REGION 1..17: note = brazikumab heavy chain CDR3
ARDRGYTSSWYPDAFDI

SEQ ID NO: 5541 - protein, 111 aa, synthetic construct
  REGION 1..111: note = brazikumab light chain V region
QSVLTQPPSVSGAPGQRVTISCTGSSSNTGAGYDVHWYQQVPGTAPKLLIYGSGNRPSGVPDRFSGSKSGTSASLAITGLQAEDEADYYCQSYDSSLSGWVFGGGTRLTVL

SEQ ID NO: 5542 - protein, 10 aa, synthetic construct
  REGION 1..10: note = brazikumab light chain CDR1
SSSNTGAGYD

SEQ ID NO: 5543 - skipped

SEQ ID NO: 5544 - protein, 11 aa, synthetic construct
  REGION 1..11: note = brazikumab light chain CDR3
QSYDSSLSGWV

SEQ ID NO: 5545 - protein, 117 aa, synthetic construct
  REGION 1..117: note = brentuximab vedotin heavy chain V region
QIQLQQSGPEVVKPGASVKISCKASGYTFTDYYITWVKQKPGQGLEWIGWIYPGSGNTKYNEKFKGKATLTVDTSSSTAFMQLSSLTSEDTAVYFCANYGNYWFAYWGQGTQVTVSA

SEQ ID NO: 5546 - protein, 8 aa, synthetic construct
  REGION 1..8: note = brentuximab vedotin heavy chain CDR1
GYTFTDYY

SEQ ID NO: 5547 - protein, 8 aa, synthetic construct
  REGION 1..8: note = brentuximab vedotin heavy chain CDR2
IYPGSGNT

SEQ ID NO: 5548 - protein, 10 aa, synthetic construct
  REGION 1..10: note = brentuximab vedotin heavy chain CDR3
ANYGNYWFAY

SEQ ID NO: 5549 - protein, 111 aa, synthetic construct
  REGION 1..111: note = brentuximab vedotin light chain V region
DIVLTQSPASLAVSLGQRATISCKASQSVDFDGDSYMNWYQQKPGQPPKVLIYAASNLESGIPARFSGSGSGTDFTLNIHPVEEEDAATYYCQQSNEDPWTFGGGTKLEIK

SEQ ID NO: 5550 - protein, 10 aa, synthetic construct
  REGION 1..10: note = brentuximab vedotin light chain CDR1
QSVDFDGDSY

SEQ ID NO: 5551 - skipped

SEQ ID NO: 5552 - protein, 9 aa, synthetic construct
  REGION 1..9: note = brentuximab vedotin light chain CDR3
QQSNEDPWT

SEQ ID NO: 5553 - protein, 115 aa, synthetic construct [sequence omitted]

SEQ ID NO: 5554 - protein, 8 aa, synthetic construct
  REGION 1..8: note = briakinumab heavy chain CDR1
GFTFSSYG

SEQ ID NO: 5555 - protein, 8 aa, synthetic construct
  REGION 1..8: note = briakinumab heavy chain CDR2
IRYDGSNK

SEQ ID NO: 5556 - protein, 8 aa, synthetic construct
  REGION 1..8: note = briakinumab heavy chain CDR3
KTHGSHDN

SEQ ID NO: 5557 - protein, 111 aa, synthetic construct [sequence omitted]

SEQ ID NO: 5558-5560 - skipped (3 entries)

SEQ ID NO: 5561 - protein, 116 aa, synthetic construct
  REGION 1..116: note = brodalumab heavy chain V region
QVQLVQSGAEVKKPGASVKVSCKASGYTFTRYGISWVRQAPGQGLEWMGWISTYSGNTNYAQKLQGRVTMTTDTSTSTAYMELRSLRSDDTAVYYCARRQLYFDYWGQGTLVTVSS

SEQ ID NO: 5562 - protein, 8 aa, synthetic construct
  REGION 1..8: note = brodalumab heavy chain CDR1
GYTFTRYG

SEQ ID NO: 5563 - protein, 8 aa, synthetic construct
  REGION 1..8: note = brodalumab heavy chain CDR2
ISTYSGNT

SEQ ID NO: 5564 - protein, 9 aa, synthetic construct
  REGION 1..9: note = brodalumab heavy chain CDR3
ARRQLYFDY

SEQ ID NO: 5565 - protein, 107 aa, synthetic construct
  REGION 1..107: note = brodalumab light chain V region
EIVMTQSPATLSVSPGERATLSCRASQSVSSNLAWFQQKPGQAPRPLIYDASTRATGVPARFSGSGSGTDFTLTISSLQSEDFAVYYCQQYDNWPLTFGGGTKVEIK

SEQ ID NO: 5566 - protein, 6 aa, synthetic construct
  REGION 1..6: note = brodalumab light chain CDR1
QSVSSN

SEQ ID NO: 5567 - skipped

SEQ ID NO: 5568 - protein, 9 aa, synthetic construct
  REGION 1..9: note = brodalumab light chain CDR3
QQYDNWPLT

SEQ ID NO: 5569 - protein, 120 aa, synthetic construct
  REGION 1..120: note = brolucizumab heavy chain V region
EVQLVESGGGLVQPGGSLRLSCTASGFSLTDYYYMTWVRQAPGKGLEWVGFIDPDDDPYYATWAKGRFTISRDNSKNTLYLQMNSLRAEDTAVYYCAGGDHNSGWGLDIWGQGTLVTVSS

SEQ ID NO: 5570 - protein, 9 aa, synthetic construct
  REGION 1..9: note = brolucizumab heavy chain CDR1
GFSLTDYYY

SEQ ID NO: 5571 - protein, 7 aa, synthetic construct
  REGION 1..7: note = brolucizumab heavy chain CDR2
IDPDDDP

SEQ ID NO: 5572 - protein, 13 aa, synthetic construct
  REGION 1..13: note = brolucizumab heavy chain CDR3
AGGDHNSGWGLDI

SEQ ID NO: 5573 - protein, 110 aa, synthetic construct
  REGION 1..110: note = brolucizumab light chain V region
EIVMTQSPSTLSASVGDRVIITCQASEIIHSWLAWYQQKPGKAPKLLIYLASTLASGVPSRFSGSGSGAEFTLTISSLQPDDFATYYCQNVYLASTNGANFGQGTKLTVL

SEQ ID NO: 5574 - protein, 6 aa, synthetic construct
  REGION 1..6: note = brolucizumab light chain CDR1
EIIHSW

SEQ ID NO: 5575 - skipped

SEQ ID NO: 5576 - protein, 12 aa, synthetic construct
  REGION 1..12: note = brolucizumab light chain CDR3
QNVYLASTNGAN

SEQ ID NO: 5577 - protein, 117 aa, synthetic construct
  REGION 1..117: note = burosumab heavy chain V region
QVQLVQSGAEVKKPGASVKVSCKASGYTFTNHYMHWVRQAPGQGLEWMGIINPISGSTSNAQKFQGRVTMTRDTSTSTVYMELSSLRSEDTAVYYCARDIVDAFDFWGQGTMVTVSS

SEQ ID NO: 5578 - protein, 8 aa, synthetic construct
  REGION 1..8: note = burosumab heavy chain CDR1
GYTFTNHY

SEQ ID NO: 5579 - protein, 8 aa, synthetic construct
  REGION 1..8: note = burosumab heavy chain CDR2
INPISGST

SEQ ID NO: 5580 - protein, 10 aa, synthetic construct
  REGION 1..10: note = burosumab heavy chain CDR3
ARDIVDAFDF

SEQ ID NO: 5581 - protein, 106 aa, synthetic construct
  REGION 1..106: note = burosumab light chain V region
AIQLTQSPSSLSASVGDRVTITCRASQGISSALVWYQQKPGKAPKLLIYDASSLESGVPSRFSGSGSGTDFTLTISSLQPEDFATYYCQQFNDYFTFGPGTKVDIK

SEQ ID NO: 5582 - protein, 6 aa, synthetic construct
  REGION 1..6: note = burosumab light chain CDR1
QGISSA

SEQ ID NO: 5583 - skipped

SEQ ID NO: 5584 - protein, 9 aa, synthetic construct
  REGION 1..9: note = burosumab light chain CDR3
QQFNDYFTF

SEQ ID NO: 5585 - protein, 115 aa, synthetic construct
  REGION 1..115: note = camidanlumab heavy chain V region
QVQLVQSGAEVKKPGSSVKVSCKASGGTFSRYIINWVRQAPGQGLEWMGRIIPILGVENYAQKFQGRVTITADKSTSTAYMELSSLRSEDTAVYYCARKDWFDYWGQGTLVTVSS

SEQ ID NO: 5586 - protein, 8 aa, synthetic construct
  REGION 1..8: note = camidanlumab heavy chain CDR1
GGTFSRYI

SEQ ID NO: 5587 - protein, 8 aa, synthetic construct
  REGION 1..8: note = camidanlumab heavy chain CDR2
IIPILGVE

SEQ ID NO: 5588 - protein, 8 aa, synthetic construct
  REGION 1..8: note = camidanlumab heavy chain CDR3
ARKDWFDY

SEQ ID NO: 5589 - protein, 107 aa, synthetic construct
  REGION 1..107: note = camidanlumab light chain V region
EIVLTQSPGTLSLSPGERATLSCRASQSVSSYLAWYQQKPGQAPRLLIYGASSRATGIPDRFSGSGSGTDFTLTISRLEPEDFAVYYCQQYGSSPLTFGGGTKVEIK

SEQ ID NO: 5590 - protein, 6 aa, synthetic construct
  REGION 1..6: note = camidanlumab light chain CDR1
QSVSSY

SEQ ID NO: 5591 - skipped

SEQ ID NO: 5592 - protein, 9 aa, synthetic construct
  REGION 1..9: note = camidanlumab light chain CDR3
QQYGSSPLT

SEQ ID NO: 5593 - protein, 115 aa, synthetic construct; identical to SEQ ID NO: 5585
  REGION 1..115: note = camidanlumab tesirine heavy chain V region

SEQ ID NO: 5594 - protein, 8 aa, synthetic construct
  REGION 1..8: note = camidanlumab tesirine heavy chain CDR1
GGTFSRYI

SEQ ID NO: 5595 - protein, 8 aa, synthetic construct
  REGION 1..8: note = camidanlumab tesirine heavy chain CDR2
IIPILGVE

SEQ ID NO: 5596 - protein, 8 aa, synthetic construct
  REGION 1..8: note = camidanlumab tesirine heavy chain CDR3
ARKDWFDY

SEQ ID NO: 5597 - protein, 107 aa, synthetic construct; identical to SEQ ID NO: 5589
  REGION 1..107: note = camidanlumab tesirine light chain V region

SEQ ID NO: 5598 - protein, 6 aa, synthetic construct
  REGION 1..6: note = camidanlumab tesirine light chain CDR1
QSVSSY

SEQ ID NO: 5599 - skipped

SEQ ID NO: 5600 - protein, 9 aa, synthetic construct
  REGION 1..9: note = camidanlumab tesirine light chain CDR3
QQYGSSPLT

SEQ ID NO: 5601 - protein, 118 aa, synthetic construct [sequence omitted]

SEQ ID NO: 5602 - protein, 8 aa, synthetic construct
  REGION 1..8: note = canakinumab heavy chain CDR1
GFTFSVYG

SEQ ID NO: 5603 - protein, 8 aa, synthetic construct
  REGION 1..8: note = canakinumab heavy chain CDR2
IWYDGDNQ

SEQ ID NO: 5604 - protein, 11 aa, synthetic construct
  REGION 1..11: note = canakinumab heavy chain CDR3
ARDLRTGPFDY

SEQ ID NO: 5605 - protein, 107 aa, synthetic construct [sequence omitted]

SEQ ID NO: 5606 - protein, 6 aa, synthetic construct
  REGION 1..6: note = canakinumab light chain CDR1
QSIGSS

SEQ ID NO: 5607 - skipped

SEQ ID NO: 5608 - protein, 9 aa, synthetic construct
  REGION 1..9: note = canakinumab light chain CDR3
HQSSSLPFT

SEQ ID NO: 5609 - protein, 128 aa, synthetic construct
  REGION 1..128: note = caplacizumab heavy chain D1 V region
EVQLVESGGGLVQPGGSLRLSCAASGRTFSYNPMGWFRQAPGKGRELVAAISRTGGSTYYPDSVEGRFTISRDNAKRMVYLQMNSLRAEDTAVYYCAAAGVRAEDGRVRTLPSEYTFWGQGTQVTVSS

SEQ ID NO: 5610 - protein, 8 aa, synthetic construct
  REGION 1..8: note = caplacizumab heavy chain D1 CDR1
GRTFSYNP

SEQ ID NO: 5611 - protein, 8 aa, synthetic construct
  REGION 1..8: note = caplacizumab heavy chain D1 CDR2
ISRTGGST

SEQ ID NO: 5612 - protein, 21 aa, synthetic construct
  REGION 1..21: note = caplacizumab heavy chain D1 CDR3
AAAGVRAEDGRVRTLPSEYTF

SEQ ID NO: 5613 - protein, 128 aa, synthetic construct; identical to SEQ ID NO: 5609
  REGION 1..128: note = caplacizumab heavy chain D3 V region

SEQ ID NO: 5614 - protein, 7 aa, synthetic construct
  REGION 1..7: note = caplacizumab heavy chain D3 CDR1
GRTFSYN

SEQ ID NO: 5615 - protein, 8 aa, synthetic construct
  REGION 1..8: note = caplacizumab heavy chain D3 CDR2
ISRTGGST

SEQ ID NO: 5616 - protein, 21 aa, synthetic construct
  REGION 1..21: note = caplacizumab heavy chain D3 CDR3
AAAGVRAEDGRVRTLPSEYTF

SEQ ID NO: 5617 - protein, 119 aa, synthetic construct
  REGION 1..119: note = carlumab heavy chain V region
QVQLVQSGAEVKKPGSSVKVSCKASGGTFSSYGISWVRQAPGQGLEWMGGIIPIFGTANYAQKFQGRVTITADESTSTAYMELSSLRSEDTAVYYCARYDGIYGELDFWGQGTLVTVSS

SEQ ID NO: 5618 - protein, 7 aa, synthetic construct
  REGION 1..7: note = carlumab heavy chain CDR1
GTFSSYG

SEQ ID NO: 5619 - protein, 8 aa, synthetic construct
  REGION 1..8: note = carlumab heavy chain CDR2
IIPIFGTA

SEQ ID NO: 5620 - protein, 12 aa, synthetic construct
  REGION 1..12: note = carlumab heavy chain CDR3
ARYDGIYGELDF

SEQ ID NO: 5621 - protein, 109 aa, synthetic construct
  REGION 1..109: note = carlumab light chain V region
EIVLTQSPATLSLSPGERATLSCRASQSVSDAYLAWYQQKPGQAPRLLIYDASSRATGVPARFSGSGSGTDFTLTISSLEPEDFAVYYCHQYIQLHSFTFGQGTKVEIK

SEQ ID NO: 5622 - protein, 7 aa, synthetic construct
  REGION 1..7: note = carlumab light chain CDR1
QSVSDAY

SEQ ID NO: 5623 - skipped

SEQ ID NO: 5624 - protein, 10 aa, synthetic construct
  REGION 1..10: note = carlumab light chain CDR3
HQYIQLHSFT

SEQ ID NO: 5625 - protein, 120 aa, synthetic construct; identical to SEQ ID NO: 428
  REGION 1..120: note = casirivimab heavy chain V region

SEQ ID NO: 5626 - protein, 8 aa, synthetic construct
  REGION 1..8: note = casirivimab heavy chain CDR1
GFTFSDYY

SEQ ID NO: 5627 - protein, 8 aa, synthetic construct
  REGION 1..8: note = casirivimab heavy chain CDR2
ITYSGSTI

SEQ ID NO: 5628 - protein, 13 aa, synthetic construct
  REGION 1..13: note = casirivimab heavy chain CDR3
ARDRGTTMVPFDY

SEQ ID NO: 5629 - protein, 107 aa, synthetic construct; identical to SEQ ID NO: 427
  REGION 1..107: note = casirivimab light chain V region

SEQ ID NO: 5630 - protein, 6 aa, synthetic construct
  REGION 1..6: note = casirivimab light chain CDR1
QDITNY

SEQ ID NO: 5631 - skipped

SEQ ID NO: 5632 - protein, 9 aa, synthetic construct
  REGION 1..9: note = casirivimab light chain CDR3
QQYDNLPLT

SEQ ID NO: 5633 - protein, 117 aa, synthetic construct [sequence omitted]

SEQ ID NO: 5634 - protein, 8 aa, synthetic construct
  REGION 1..8: note = cemiplimab heavy chain CDR1
GFTFSNFG

SEQ ID NO: 5635 - protein, 8 aa, synthetic construct
  REGION 1..8: note = cemiplimab heavy chain CDR2
ISGGGRDT

SEQ ID NO: 5636 - protein, 10 aa, synthetic construct
  REGION 1..10: note = cemiplimab heavy chain CDR3
VKWGNIYFDY

SEQ ID NO: 5637 - protein, 107 aa, synthetic construct [sequence omitted]

SEQ ID NO: 5638 - protein, 6 aa, synthetic construct
  REGION 1..6: note = cemiplimab light chain CDR1
LSINTF

SEQ ID NO: 5639 - skipped

SEQ ID NO: 5640 - protein, 9 aa, synthetic construct
  REGION 1..9: note = cemiplimab light chain CDR3
QQSSNTPFT

SEQ ID NO: 5641 - protein, 121 aa, synthetic construct
  REGION 1..121: note = cergutuzumab heavy chain V region
QVQLVQSGAEVKKPGASVKVSCKASGYTFTEFGMNWVRQAPGQGLEWMGWINTKTGEATYVEEFKGRVTFTTDTSTSTAYMELRSLRSDDTAVYYCARWDFAYYVEAMDYWGQGTTVTVSS

SEQ ID NO: 5642 - protein, 8 aa, synthetic construct
  REGION 1..8: note = cergutuzumab heavy chain CDR1
GYTFTEFG

SEQ ID NO: 5643 - protein, 8 aa, synthetic construct
  REGION 1..8: note = cergutuzumab heavy chain CDR2
INTKTGEA

SEQ ID NO: 5644 - protein, 14 aa, synthetic construct
  REGION 1..14: note = cergutuzumab heavy chain CDR3
ARWDFAYYVEAMDY

SEQ ID NO: 5645 - protein, 108 aa, synthetic construct
  REGION 1..108: note = cergutuzumab light chain V region
DIQMTQSPSSLSASVGDRVTITCKASAAVGTYVAWYQQKPGKAPKLLIYSASYRKRGVPSRFSGSGSGTDFTLTISSLQPEDFATYYCHQYYTYPLFTFGQGTKLEIK

SEQ ID NO: 5646 - protein, 6 aa, synthetic construct
  REGION 1..6: note = cergutuzumab light chain CDR1
AAVGTY

SEQ ID NO: 5647 - skipped

SEQ ID NO: 5648 - protein, 11 aa, synthetic construct
  REGION 1..11: note = cergutuzumab light chain CDR3
HQYYTYPLFTF

SEQ ID NO: 5649 - protein, 119 aa, synthetic construct
  REGION 1..119: note = certuximab heavy chain V region
QVQLKQSGPGLVQPSQSLSITCTVSGFSLTNYGVHWVRQSPGKGLEWLGVIWSGGNTDYNTPFTSRLSINKDNSKSQVFFKMNSLQSNDTAIYYCARALTYYDYEFAYWGQGTLVTVSA

SEQ ID NO: 5650 - protein, 8 aa, synthetic construct
  REGION 1..8: note = certuximab heavy chain CDR1
GFSLTNYG

SEQ ID NO: 5651 - protein, 7 aa, synthetic construct
  REGION 1..7: note = certuximab heavy chain CDR2
IWSGGNT

SEQ ID NO: 5652 - protein, 13 aa, synthetic construct
  REGION 1..13: note = certuximab heavy chain CDR3
ARALTYYDYEFAY

SEQ ID NO: 5653 - protein, 107 aa, synthetic construct
  REGION 1..107: note = certuximab light chain V region
DILLTQSPVILSVSPGERVSFSCRASQSIGTNIHWYQQRTNGSPRLLIKYASESISGIPSRFSGSGSGTDFTLSINSVESEDIADYYCQQNNNWPTTFGAGTKLELK

SEQ ID NO: 5654 - protein, 6 aa, synthetic construct
  REGION 1..6: note = certuximab light chain CDR1
QSIGTN

SEQ ID NO: 5655 - skipped

SEQ ID NO: 5656 - protein, 9 aa, synthetic construct
  REGION 1..9: note = certuximab light chain CDR3
QQNNNWPTT

SEQ ID NO: 5657 - protein, 123 aa, synthetic construct
  REGION 1..123: note = cetrelimab heavy chain V region
QVQLVQSGAEVKKPGSSVKVSCKASGGTFSSYAISWVRQAPGQGLEWMGGIIPIFDTANYAQKFQGRVTITADESTSTAYMELSSLRSEDTAVYYCARPGLAAAYDTGSLDYWGQGTLVTVSS

SEQ ID NO: 5658 - protein, 8 aa, synthetic construct
  REGION 1..8: note = cetrelimab heavy chain CDR1
GGTFSSYA

SEQ ID NO: 5659 - protein, 8 aa, synthetic construct
  REGION 1..8: note = cetrelimab heavy chain CDR2
IIPIFDTA

SEQ ID NO: 5660 - protein, 16 aa, synthetic construct
  REGION 1..16: note = cetrelimab heavy chain CDR3
ARPGLAAAYDTGSLDY

SEQ ID NO: 5661 - protein, 107 aa, synthetic construct
  REGION 1..107: note = cetrelimab light chain V region
EIVLTQSPATLSLSPGERATLSCRASQSVRSYLAWYQQKPGQAPRLLIYDASNRATGIPARFSGSGSGTDFTLTISSLEPEDFAVYYCQQRNYWPLTFGQGTKVEIK

SEQ ID NO: 5662 - protein, 6 aa, synthetic construct
  REGION 1..6: note = cetrelimab light chain CDR1
QSVRSY

SEQ ID NO: 5663 - skipped

SEQ ID NO: 5664 - protein, 9 aa, synthetic construct
  REGION 1..9: note = cetrelimab light chain CDR3
QQRNYWPLT

SEQ ID NO: 5665 - protein, 131 aa, synthetic construct; identical to SEQ ID NO: 448
  REGION 1..131: note = cilgavimab heavy chain V region

SEQ ID NO: 5666 - protein, 8 aa, synthetic construct
  REGION 1..8: note = cilgavimab heavy chain CDR1
GFTFRDVW

SEQ ID NO: 5667 - protein, 10 aa, synthetic construct
  REGION 1..10: note = cilgavimab heavy chain CDR2
IKSKIDGGTT

SEQ ID NO: 5668 - protein, 22 aa, synthetic construct
  REGION 1..22: note = cilgavimab heavy chain CDR3
TTAGSYYYDTVGPGLPEGKFDY

SEQ ID NO: 5669 - protein, 112 aa, synthetic construct; identical to SEQ ID NO: 447
  REGION 1..112: note = cilgavimab light chain V region

SEQ ID NO: 5670 - protein, 12 aa, synthetic construct
  REGION 1..12: note = cilgavimab light chain CDR1
QSVLYSSNNKNY

SEQ ID NO: 5671 - skipped

SEQ ID NO: 5672 - protein, 8 aa, synthetic construct
  REGION 1..8: note = cilgavimab light chain CDR3
QQYYSTLT

SEQ ID NO: 5673 - protein, 130 aa, synthetic construct
  REGION 1..130: note = cixutumumab heavy chain V region
EVQLVQSGAEVKKPGSSVKVSCKASGGTFSSYAISWVRQAPGQGLEWMGGIIPIFGTANYAQKFQGRVTITADKSTSTAYMELSSLRSEDTAVYYCARAPLRFLEWSTQDHYYYYYMDVWGKGTTVTVSS

SEQ ID NO: 5674 - protein, 8 aa, synthetic construct
  REGION 1..8: note = cixutumumab heavy chain CDR1
GGTFSSYA

SEQ ID NO: 5675 - protein, 8 aa, synthetic construct
  REGION 1..8: note = cixutumumab heavy chain CDR2
IIPIFGTA

SEQ ID NO: 5676 - protein, 23 aa, synthetic construct
  REGION 1..23: note = cixutumumab heavy chain CDR3
ARAPLRFLEWSTQDHYYYYYMDV

SEQ ID NO: 5677 - protein, 108 aa, synthetic construct
  REGION 1..108: note = cixutumumab light chain V region
SSELTQDPAVSVALGQTVRITCQGDSLRSYYATWYQQKPGQAPILVIYGENKRPSGIPDRFSGSSSGNTASLTITGAQAEDEADYYCKSRDGSGQHLVFGGGTKLTVL

SEQ ID NO: 5678 - protein, 6 aa, synthetic construct
  REGION 1..6: note = cixutumumab light chain CDR1
SLRSYY

SEQ ID NO: 5679 - skipped

SEQ ID NO: 5680 - protein, 11 aa, synthetic construct
  REGION 1..11: note = cixutumumab light chain CDR3
KSRDGSGQHLV

SEQ ID NO: 5681 - protein, 122 aa, synthetic construct
  REGION 1..122: note = conatumumab heavy chain V region
QVQLQESGPGLVKPSQTLSLTCTVSGGSISSGDYFWSWIRQLPGKGLEWIGHIHNSGTTYYNPSLKSRVTISVDTSKKQFSLRLSSVTAADTAVYYCARDRGGDYYYGMDVWGQGTTVTVSS

SEQ ID NO: 5682 - protein, 10 aa, synthetic construct
  REGION 1..10: note = conatumumab heavy chain CDR1
GGSISSGDYF

SEQ ID NO: 5683 - protein, 7 aa, synthetic construct
  REGION 1..7: note = conatumumab heavy chain CDR2
IHNSGTT

SEQ ID NO: 5684 - protein, 14 aa, synthetic construct
  REGION 1..14: note = conatumumab heavy chain CDR3
ARDRGGDYYYGMDV

SEQ ID NO: 5685 - protein, 108 aa, synthetic construct
  REGION 1..108: note = conatumumab light chain V region
EIVLTQSPGTLSLSPGERATLSCRASQGISRSYLAWYQQKPGQAPSLLIYGASSRATGIPDRFSGSGSGTDFTLTISRLEPEDFAVYYCQQFGSSPWTFGQGTKVEIK

SEQ ID NO: 5686 - protein, 7 aa, synthetic construct
  REGION 1..7: note = conatumumab light chain CDR1
QGISRSY

SEQ ID NO: 5687 - skipped

SEQ ID NO: 5688 - protein, 8 aa, synthetic construct
  REGION 1..8: note = conatumumab light chain CDR3
QQFGSSPW

SEQ ID NO: 5689 - protein, 120 aa, synthetic construct
  REGION 1..120: note = cosibelimab heavy chain V region
EVQLVQSGAEVKKPGSSVKVSCKASGGTFSRSAISWVRQAPGQGLEWMGVIIPAFGEANYAQKFQGRVTITADESTSTAYMELSSLRSEDTAVYYCARGRQMFGAGIDFWGQGTLVTVSS

SEQ ID NO: 5690 - protein, 8 aa, synthetic construct
  REGION 1..8: note = cosibelimab heavy chain CDR1
GGTFSRSA

SEQ ID NO: 5691 - protein, 8 aa, synthetic construct
  REGION 1..8: note = cosibelimab heavy chain CDR2
IIPAFGEA

SEQ ID NO: 5692 - protein, 13 aa, synthetic construct
  REGION 1..13: note = cosibelimab heavy chain CDR3
ARGRQMFGAGIDF

SEQ ID NO: 5693 - protein, 112 aa, synthetic construct
  REGION 1..112: note = cosibelimab light chain V region
NFMLTQPHSVSESPGKTVTISCTRSSGSIDSNYVQWYQQRPGSAPTTVIYEDNQRPSGVPDRFSGSIDSSSNSASLTISGLKTEDEADYYCQSYDSNNRHVIFGGGTKLTVL

SEQ ID NO: 5694 - protein, 8 aa, synthetic construct
  REGION 1..8: note = cosibelimab light chain CDR1
SGSIDSNY

SEQ ID NO: 5695 - skipped

SEQ ID NO: 5696 - protein, 11 aa, synthetic construct
  REGION 1..11: note = cosibelimab light chain CDR3
QSYDSNNRHVI

SEQ ID NO: 5697 - protein, 122 aa, synthetic construct
  REGION 1..122: note = crizanlizumab heavy chain V region
QVQLVQSGAEVKKPGASVKVSCKVSGYTFTSYDINWVRQAPGKGLEWMGWIYPGDGSIKYNEKFKGRVTMTVDKSTDTAYMELSSLRSEDTAVYYCARRGEYGNYEGAMDYWGQGTLVTVSS

SEQ ID NO: 5698 - protein, 8 aa, synthetic construct
  REGION 1..8: note = crizanlizumab heavy chain CDR1
GYTFTSYD

SEQ ID NO: 5699 - protein, 8 aa, synthetic construct
  REGION 1..8: note = crizanlizumab heavy chain CDR2
IYPGDGSI

SEQ ID NO: 5700 - protein, 15 aa, synthetic construct
  REGION 1..15: note = crizanlizumab heavy chain CDR3
ARRGEYGNYEGAMDY

SEQ ID NO: 5701 - protein, 111 aa, synthetic construct
  REGION 1..111: note = crizanlizumab light chain V region
DIQMTQSPSSLSASVGDRVTITCKASQSVDYDGHSYMNWYQQKPGKAPKLLIYAASNLESGVPSRFSGSGSGTDFTLTISSLQPEDFATYYCQQSDENPLTFGGGTKVEIK

SEQ ID NO: 5702 - protein, 10 aa, synthetic construct
  REGION 1..10: note = crizanlizumab light chain CDR1
QSVDYDGHSY

SEQ ID NO: 5703 - skipped

SEQ ID NO: 5704 - protein, 9 aa, synthetic construct
  REGION 1..9: note = crizanlizumab light chain CDR3
QQSDENPLT

SEQ ID NO: 5705 - protein, 128 aa, synthetic construct
  REGION 1..128: note = crotedumab heavy chain V region
EVQLVESGGGLVQPGGSLRLSCAASGFTFSNYLMNWVRQAPGKGLEWLANIQEDGIEKYYVDSVKGRFTISRDNAKNSLYLQMNSLRAEDTAVYYCAREPSHYDILTGYDYYYGMDVWGQGTTVTVSS

SEQ ID NO: 5706 - protein, 8 aa, synthetic construct
  REGION 1..8: note = crotedumab heavy chain CDR1
GFTFSNYL

SEQ ID NO: 5707 - protein, 8 aa, synthetic construct
  REGION 1..8: note = crotedumab heavy chain CDR2
IQEDGIEK

SEQ ID NO: 5708 - protein, 21 aa, synthetic construct
  REGION 1..21: note = crotedumab heavy chain CDR3
AREPSHYDILTGYDYYYGMDV

SEQ ID NO: 5709 - protein, 107 aa, synthetic construct
  REGION 1..107: note = crotedumab light chain V region
DIQMTQSPSSLSASVGDRVTITCRASQGIRNDLGWYQQKPGKAPKRLIYAASSLQSGVPSRFSGSGSGTEFILTVSSLQPEDFATYYCLQYNSNPFTFGPGTKVDIK

SEQ ID NO: 5710 - protein, 6 aa, synthetic construct
  REGION 1..6: note = crotedumab light chain CDR1
QGIRND

SEQ ID NO: 5711 - skipped

SEQ ID NO: 5712 - protein, 10 aa, synthetic construct
  REGION 1..10: note = crotedumab light chain CDR3
LQYNSNPFTF

SEQ ID NO: 5713 - protein, 124 aa, synthetic construct
  REGION 1..124: note = cudarolimab heavy chain V region
QVQLVESGGGVVQPGRSLRLSCAASGFTFSSYGMHWVRQAPGKGLEWVAVISYDGSNKYYADSVKGRFTISRDNSKNTLYLQMNSLRAEDTAVYYCARGRPWYSETGTSAFDIWGQGTMVTVSS

SEQ ID NO: 5714 - protein, 8 aa, synthetic construct
  REGION 1..8: note = cudarolimab heavy chain CDR1
GFTFSSYG

SEQ ID NO: 5715 - protein, 8 aa, synthetic construct
  REGION 1..8: note = cudarolimab heavy chain CDR2
ISYDGSNK

SEQ ID NO: 5716 - protein, 17 aa, synthetic construct
  REGION 1..17: note = cudarolimab heavy chain CDR3
ARGRPWYSETGTSAFDI

SEQ ID NO: 5717 - protein, 106 aa, synthetic construct
  REGION 1..106: note = cudarolimab light chain V region
DIQMTQSPSSLSASVGDRVTITCQASQDISNYLNWYQQKPGKAPKLLIYDASNLETGVPSRFSGSGSGTDFTFTISSLQPEDIATYYCQQSDHYPTFGGGTKVEIK

SEQ ID NO: 5718 - protein, 6 aa, synthetic construct
  REGION 1..6: note = cudarolimab light chain CDR1
QDISNY

SEQ ID NO: 5719 - skipped

SEQ ID NO: 5720 - protein, 8 aa, synthetic construct
  REGION 1..8: note = cudarolimab light chain CDR3
QQSDHYPT

SEQ ID NO: 5721 - protein, 116 aa, synthetic construct
  REGION 1..116: note = daclizumab heavy chain V region
QVQLVQSGAEVKKPGSSVKVSCKASGYTFTSYRMHWVRQAPGQGLEWIGYINPSTGYTEYNQKFKDKATITADESTNTAYMELSSLRSEDTAVYYCARGGGVFDYWGQGTLVTVSS

SEQ ID NO: 5722 - protein, 8 aa, synthetic construct
  REGION 1..8: note = daclizumab heavy chain CDR1
GYTFTSYR

SEQ ID NO: 5723 - protein, 8 aa, synthetic construct
  REGION 1..8: note = daclizumab heavy chain CDR2
INPSTGYT

SEQ ID NO: 5724 - protein, 9 aa, synthetic construct
  REGION 1..9: note = daclizumab heavy chain CDR3
ARGGGVFDY

SEQ ID NO: 5725 - protein, 106 aa, synthetic construct
  REGION 1..106: note = daclizumab light chain V region
DIQMTQSPSTLSASVGDRVTITCSASSSISYMHWYQQKPGKAPKLLIYTTSNLASGVPARFSGSGSGTEFTLTISSLQPDDFATYYCHQRSTYPLTFGQGTKVEVK

SEQ ID NO: 5726 - protein, 4 aa, synthetic construct
  REGION 1..4: note = daclizumab light chain CDR1
SSIS

SEQ ID NO: 5727 - skipped

SEQ ID NO: 5728 - protein, 9 aa, synthetic construct
  REGION 1..9: note = daclizumab light chain CDR3
HQRSTYPLT

SEQ ID NO: 5729 - protein, 130 aa, synthetic construct
  REGION 1..130: note = dalutrafusp alfa heavy chain V region
QVQLVQSGAEVKKPGSSVKVSCKASGGIFRTYAISWVRQAPGQGLEWMGGIIPMFGTVNYAQKFQGRVTISADKSTSTAYMELSRLRSEDTAVYYCARPPSGGCGGDCSRRGYYYAMDVWGQGTTITVSS

SEQ ID NO: 5730 - protein, 8 aa, synthetic construct
  REGION 1..8: note = dalutrafusp alfa heavy chain CDR1
GGIFRTYA

SEQ ID NO: 5731 - protein, 8 aa, synthetic construct
  REGION 1..8: note = dalutrafusp alfa heavy chain CDR2
IIPMFGTV

SEQ ID NO: 5732 - protein, 23 aa, synthetic construct
  REGION 1..23: note = dalutrafusp alfa heavy chain CDR3
ARPPSGGCGGDCSRRGYYYAMDV

SEQ ID NO: 5733 - protein, 110 aa, synthetic construct
  REGION 1..110: note = dalutrafusp alfa light chain V region
QSALTQPASVSGSPGQSITISCSGSSSDVGGYKYVSWYQQHPGKAPQLMIYDVNNRPSGVSNRFSGSKSGNTASLTISGLQAEDEADYYCSSYTSSSTRVFGGGTKLTVL

SEQ ID NO: 5734 - protein, 9 aa, synthetic construct
  REGION 1..9: note = dalutrafusp alfa light chain CDR1
SSDVGGYKY

SEQ ID NO: 5735 - skipped

SEQ ID NO: 5736 - protein, 10 aa, synthetic construct
  REGION 1..10: note = dalutrafusp alfa light chain CDR3
SSYTSSSTRV

SEQ ID NO: 5737 - protein, 122 aa, synthetic construct [sequence omitted]

SEQ ID NO: 5738 - protein, 8 aa, synthetic construct
  REGION 1..8: note = daratumumab heavy chain CDR1
GFTFNSFA

SEQ ID NO: 5739 - protein, 8 aa, synthetic construct
  REGION 1..8: note = daratumumab heavy chain CDR2
ISGSGGGT

SEQ ID NO: 5740 - protein, 15 aa, synthetic construct
  REGION 1..15: note = daratumumab heavy chain CDR3
AKDKILWFGEPVFDY

SEQ ID NO: 5741 - protein, 107 aa, synthetic construct [sequence omitted]

SEQ ID NO: 5742 - protein, 6 aa, synthetic construct
  REGION 1..6: note = daratumumab light chain CDR1
QSVSSY

SEQ ID NO: 5743 - skipped

SEQ ID NO: 5744 - protein, 10 aa, synthetic construct
  REGION 1..10: note = daratumumab light chain CDR3
QQRSNWPPTF

SEQ ID NO: 5745 - protein, 122 aa, synthetic construct
  REGION 1..122: note = daxdilimab heavy chain V region
QVQLQQSGAEVKKPGASVKVSCKASGYTFTSYGISWVRQAPGQGLEWMGWISAYNGNTNYAQKLQGRVTMTTDTSTSTAYMELRSLRSDDTAVYYCARNGLWGWDSDAFDIWGRGTLVTVSS

SEQ ID NO: 5746 - protein, 8 aa, synthetic construct
  REGION 1..8: note = daxdilimab heavy chain CDR1
GYTFTSYG

SEQ ID NO: 5747 - protein, 8 aa, synthetic construct
  REGION 1..8: note = daxdilimab heavy chain CDR2
ISAYNGNT

SEQ ID NO: 5748 - protein, 15 aa, synthetic construct
  REGION 1..15: note = daxdilimab heavy chain CDR3
ARNGLWGWDSDAFDI

SEQ ID NO: 5749 - protein, 110 aa, synthetic construct
  REGION 1..110: note = daxdilimab light chain V region
QSALTQPASVSGSPGQSITISCTGTSSDVGGYNYVSWYQQHPGKAPKLMIYDVSNRPSGVSNRFSGSKSGNTASLTISGLQAEDEADYYCSSYTSSSTVVFGGGTKVTVL

SEQ ID NO: 5750 - protein, 9 aa, synthetic construct
  REGION 1..9: note = daxdilimab light chain CDR1
SSDVGGYNY

SEQ ID NO: 5751 - skipped

SEQ ID NO: 5752 - protein, 10 aa, synthetic construct
  REGION 1..10: note = daxdilimab light chain CDR3
SSYTSSSTVV

SEQ ID NO: 5753 - protein, 120 aa, synthetic construct
  REGION 1..120: note = dectrekumab heavy chain V region
EVQLVESGGGVVQPGRSLRLSCAASGFTFSSYGMHWVRQAPGKGLEWVAIIWYDGSNKYYADSVKGRFTISRDNSKNTLYLQMNSLRAEDTAVYYCARLWFGDLDAFDIWGQGTMVTVSS

SEQ ID NO: 5754 - protein, 8 aa, synthetic construct
  REGION 1..8: note = dectrekumab heavy chain CDR1
GFTFSSYG

SEQ ID NO: 5755 - protein, 8 aa, synthetic construct
  REGION 1..8: note = dectrekumab heavy chain CDR2
IWYDGSNK

SEQ ID NO: 5756 - protein, 13 aa, synthetic construct
  REGION 1..13: note = dectrekumab heavy chain CDR3
ARLWFGDLDAFDI

SEQ ID NO: 5757 - protein, 109 aa, synthetic construct
  REGION 1..109: note = dectrekumab light chain V region
EIVLTQSPATLSLSPGERAILSCRAGQSVSSYLVWYQQKPGQAPRLLIYDASNRATGIPARFSGSGSGTDFTLTISSLEPEDFAVYYCQQRSSWPPVYTFGQGTKLEIK

SEQ ID NO: 5758 - protein, 6 aa, synthetic construct
  REGION 1..6: note = dectrekumab light chain CDR1
QSVSSY

SEQ ID NO: 5759 - skipped

SEQ ID NO: 5760 - protein, 11 aa, synthetic construct
  REGION 1..11: note = dectrekumab light chain CDR3
QQRSSWPPVYT

SEQ ID NO: 5761 - protein, 119 aa, synthetic construct [sequence omitted]

SEQ ID NO: 5762 - protein, 10 aa, synthetic construct
  REGION 1..10: note = demupitamab heavy chain CDR1
GGSVSSGDYY

SEQ ID NO: 5763 - protein, 7 aa, synthetic construct
  REGION 1..7: note = demupitamab heavy chain CDR2
IYYSGNT

SEQ ID NO: 5764 - protein, 11 aa, synthetic construct
  REGION 1..11: note = demupitamab heavy chain CDR3
VRDRVTGAFDI

SEQ ID NO: 5765 - protein, 107 aa, synthetic construct
  REGION 1..107: note = demupitamab light chain V region
DIQMTQSPSTLSASVGDRVTITCQASQDISNYLNWYQQKPGKAPKLLIYDASNLETGVPSRFSGSGSGTDFTFTISSLQPEDIATYFCQHFDHLPLAFGGGTKVEIK

SEQ ID NO: 5766 - protein, 6 aa, synthetic construct
  REGION 1..6: note = demupitamab light chain CDR1
QDISNY

SEQ ID NO: 5767 - skipped

SEQ ID NO: 5768 - protein, 9 aa, synthetic construct
  REGION 1..9: note = demupitamab light chain CDR3
QHFDHLPLA

SEQ ID NO: 5769 - protein, 122 aa, synthetic construct
  REGION 1..122: note = denosumab heavy chain V region
EVQLLESGGGLVQPGGSLRLSCAASGFTFSSYAMSWVRQAPGKGLEWVSGITGSGGSTYYADSVKGRFTISRDNSKNTLYLQMNSLRAEDTAVYYCAKDPGTTVIMSWFDPWGQGTLVTVSS

SEQ ID NO: 5770 - protein, 8 aa, synthetic construct
  REGION 1..8: note = denosumab heavy chain CDR1
GFTFSSYA

SEQ ID NO: 5771 - protein, 8 aa, synthetic construct
  REGION 1..8: note = denosumab heavy chain CDR2
ITGSGGST

SEQ ID NO: 5772 - protein, 15 aa, synthetic construct
  REGION 1..15: note = denosumab heavy chain CDR3
AKDPGTTVIMSWFDP

SEQ ID NO: 5773 - protein, 108 aa, synthetic construct
  REGION 1..108: note = denosumab light chain V region
EIVLTQSPGTLSLSPGERATLSCRASQSVRGRYLAWYQQKPGQAPRLLIYGASSRATGIPDRFSGSGSGTDFTLTISRLEPEDFAVFYCQQYGSSPRTFGQGTKVEIK

SEQ ID NO: 5774 - protein, 7 aa, synthetic construct
  REGION 1..7: note = denosumab light chain CDR1
QSVRGRY

SEQ ID NO: 5775 - skipped

SEQ ID NO: 5776 - protein, 9 aa, synthetic construct
  REGION 1..9: note = denosumab light chain CDR3
QQYGSSPRT

SEQ ID NO: 5777 - protein, 113 aa, synthetic construct [sequence omitted]

SEQ ID NO: 5778 - protein, 8 aa, synthetic construct
  REGION 1..8: note = dinutuximab heavy chain CDR1
GSSFTGYN

SEQ ID NO: 5779 - protein, 8 aa, synthetic construct
  REGION 1..8: note = dinutuximab heavy chain CDR2
IDPYYGGT

SEQ ID NO: 5780 - protein, 6 aa, synthetic construct
  REGION 1..6: note = dinutuximab heavy chain CDR3
VSGMEY

SEQ ID NO: 5781 - protein, 113 aa, synthetic construct [sequence omitted]

SEQ ID NO: 5782 - protein, 11 aa, synthetic construct
  REGION 1..11: note = dinutuximab light chain CDR1
QSLVHRNGNTY

SEQ ID NO: 5783 - skipped

SEQ ID NO: 5784 - protein, 10 aa, synthetic construct
  REGION 1..10: note = dinutuximab light chain CDR3
SQSTHVPPLT

SEQ ID NO: 5785 - protein, 121 aa, synthetic construct [sequence omitted]

SEQ ID NO: 5786 - protein, 8 aa, synthetic construct
  REGION 1..8: note = diridavumab heavy chain CDR1
GGPFRSYA

SEQ ID NO: 5787 - protein, 8 aa, synthetic construct
  REGION 1..8: note = diridavumab heavy chain CDR2
IIPIFGTT

SEQ ID NO: 5788 - protein, 14 aa, synthetic construct
  REGION 1..14: note = diridavumab heavy chain CDR3
AKHMGYQVRETMDV

SEQ ID NO: 5789 - protein, 111 aa, synthetic construct [sequence omitted]

SEQ ID NO: 5790 - protein, 8 aa, synthetic construct
  REGION 1..8: note = diridavumab light chain CDR1
SSNIGNDY

SEQ ID NO: 5791 - skipped

SEQ ID NO: 5792 - protein, 12 aa, synthetic construct
  REGION 1..12: note = diridavumab light chain CDR3
ATWDRRPTAYVV

SEQ ID NO: 5793 - protein, 116 aa, synthetic construct
  REGION 1..116: note = dostarlimab heavy chain V region
EVQLLESGGGLVQPGGSLRLSCAASGFTFSSYDMSWVRQAPGKGLEWVSTISGGGSYTYYQDSVKGRFTISRDNSKNTLYLQMNSLRAEDTAVYYCASPYYAMDYWGQGTTVTVSS

SEQ ID NO: 5794 - protein, 8 aa, synthetic construct
  REGION 1..8: note = dostarlimab heavy chain CDR1
GFTFSSYD

SEQ ID NO: 5795 - protein, 8 aa, synthetic construct
  REGION 1..8: note = dostarlimab heavy chain CDR2
ISGGGSYT

SEQ ID NO: 5796 - protein, 9 aa, synthetic construct
  REGION 1..9: note = dostarlimab heavy chain CDR3
ASPYYAMDY

SEQ ID NO: 5797 - protein, 107 aa, synthetic construct
  REGION 1..107: note = dostarlimab light chain V region
DIQLTQSPSFLSAYVGDRVTITCKASQDVGTAVAWYQQKPGKAPKLLIYWASTLHTGVPSRFSGSGSGTEFTLTISSLQPEDFATYYCQHYSSYPWTFGQGTKLEIK

SEQ ID NO: 5798 - protein, 6 aa, synthetic construct
  REGION 1..6: note = dostarlimab light chain CDR1
QDVGTA

SEQ ID NO: 5799 - skipped

SEQ ID NO: 5800 - protein, 9 aa, synthetic construct
  REGION 1..9: note = dostarlimab light chain CDR3
QHYSSYPWT

SEQ ID NO: 5801 - protein, 121 aa, synthetic construct [sequence omitted]

SEQ ID NO: 5802 - protein, 8 aa, synthetic construct
  REGION 1..8: note = drozitumab heavy chain CDR1
GFTFDDYA

SEQ ID NO: 5803 - protein, 8 aa, synthetic construct
  REGION 1..8: note = drozitumab heavy chain CDR2
INWQGGST

SEQ ID NO: 5804 - protein, 14 aa, synthetic construct
  REGION 1..14: note = drozitumab heavy chain CDR3
AKILGAGRGWYFDY

SEQ ID NO: 5805 - protein, 107 aa, synthetic construct [sequence omitted]

SEQ ID NO: 5806 - protein, 6 aa, synthetic construct
  REGION 1..6: note = drozitumab light chain CDR1
SLRSYY

SEQ ID NO: 5807 - skipped

SEQ ID NO: 5808 - protein, 11 aa, synthetic construct
  REGION 1..11: note = drozitumab light chain CDR3
NSADSSGNHVV

SEQ ID NO: 5809 - protein, 125 aa, synthetic construct [sequence omitted]

SEQ ID NO: 5810 - protein, 8 aa, synthetic construct
  REGION 1..8: note = dupilumab heavy chain CDR1
GFTFRDYA

SEQ ID NO: 5811 - protein, 8 aa, synthetic construct
  REGION 1..8: note = dupilumab heavy chain CDR2
ISGSGGNT

SEQ ID NO: 5812 - protein, 18 aa, synthetic construct
  REGION 1..18: note = dupilumab heavy chain CDR3
AKDRLSITIRPRYYGLDV

SEQ ID NO: 5813 - protein, 112 aa, synthetic construct [sequence omitted]

SEQ ID NO: 5814 - protein, 11 aa, synthetic construct
  REGION 1..11: note = dupilumab light chain CDR1
QSLLYSIGYNY

SEQ ID NO: 5815 - skipped

SEQ ID NO: 5816 - protein, 9 aa, synthetic construct
  REGION 1..9: note = dupilumab light chain CDR3
MQALQTPYT

SEQ ID NO: 5817 - protein, 121 aa, synthetic construct
  REGION 1..121: note = durvalumab heavy chain V region
EVQLVESGGGLVQPGGSLRLSCAASGFTFSRYWMSWVRQAPGKGLEWVANIKQDGSEKYYVDSVKGRFTISRDNAKNSLYLQMNSLRAEDTAVYYCAREGGWFGELAFDYWGQGTLVTVSS

SEQ ID NO: 5818 - protein, 11 aa, synthetic construct
  REGION 1..11: note = durvalumab heavy chain CDR1
GFTFSRYWMSW

SEQ ID NO: 5819 - protein, 8 aa, synthetic construct
  REGION 1..8: note = durvalumab heavy chain CDR2
IKQDGSEK

SEQ ID NO: 5820 - protein, 14 aa, synthetic construct
  REGION 1..14: note = durvalumab heavy chain CDR3
AREGGWFGELAFDY

SEQ ID NO: 5821 - protein, 108 aa, synthetic construct
  REGION 1..108: note = durvalumab light chain V region
EIVLTQSPGTLSLSPGERATLSCRASQRVSSSYLAWYQQKPGQAPRLLIYDASSRATGIPDRFSGSGSGTDFTLTISRLEPEDFAVYYCQQYGSLPWTFGQGTKVEIK

SEQ ID NO: 5822 - protein, 7 aa, synthetic construct
  REGION 1..7: note = durvalumab light chain CDR1
QRVSSSY

SEQ ID NO: 5823 - skipped

SEQ ID NO: 5824 - protein, 9 aa, synthetic construct
  REGION 1..9: note = durvalumab light chain CDR3
QQYGSLPWT

SEQ ID NO: 5825 - protein, 120 aa, synthetic construct
  REGION 1..120: note = dusigitumab heavy chain V region
QVQLVQSGAEVKKPGASVKVSCKASGYTFTSYDINWVRQATGQGLEWMGWMNPNSGNTGYAQKFQGRVTMTRNTSISTAYMELSSLRSEDTAVYYCARDPYYYYYGMDVWGQGTTVTVSS

SEQ ID NO: 5826 - protein, 8 aa, synthetic construct
  REGION 1..8: note = dusigitumab heavy chain CDR1
GYTFTSYD

SEQ ID NO: 5827 - protein, 8 aa, synthetic construct
  REGION 1..8: note = dusigitumab heavy chain CDR2
MNPNSGNT

SEQ ID NO: 5828 - protein, 12 aa, synthetic construct
  REGION 1..12: note = dusigitumab heavy chain CDR3
ARDPYYYYYGMD

SEQ ID NO: 5829 - protein, 111 aa, synthetic construct
  REGION 1..111: note = dusigitumab light chain V region
QSVLTQPPSVSAAPGQKVTISCSGSSSNIENNHVSWYQQLPGTAPKLLIYDNNKRPSGIPDRFSGSKSGTSATLGITGLQTGDEADYYCETWDTSLSAGRVFGGGTKLTVL

SEQ ID NO: 5830 - protein, 8 aa, synthetic construct
  REGION 1..8: note = dusigitumab light chain CDR1
SSNIENNH

SEQ ID NO: 5831 - skipped

SEQ ID NO: 5832 - protein, 12 aa, synthetic construct
  REGION 1..12: note = dusigitumab light chain CDR3
ETWDTSLSAGRV

SEQ ID NO: 5833 - protein, 118 aa, synthetic construct
  REGION 1..118: note = eblasakimab heavy chain V region
EVQLVQSGAEVKKPGESLKISCKGSGYSFTSYWIGWVRQMPGKGLEWMGVIYPGDSYTRYSPSFQGQVTISADKSISTAYLQWSSLKASDTAMYYCARMPNWGSLDHWGQGTLVTVSS

SEQ ID NO: 5834 - protein, 8 aa, synthetic construct
  REGION 1..8: note = eblasakimab heavy chain CDR1
GYSFTSYW

SEQ ID NO: 5835 - protein, 8 aa, synthetic construct
  REGION 1..8: note = eblasakimab heavy chain CDR2
IYPGDSYT

SEQ ID NO: 5836 - protein, 11 aa, synthetic construct
  REGION 1..11: note = eblasakimab heavy chain CDR3
ARMPNWGSLDH

SEQ ID NO: 5837 - protein, 104 aa, synthetic construct
  REGION 1..104: note = eblasakimab light chain V region
EIVLTQSPGTLSLSPGERATLSCRASQSISSSYLAWYQQKPGQAPRLLIYGASSRATGIPDRFSGSGSGTDFTLTISRLEPEDFAVYYCQQYASFGQGTKVEIK

SEQ ID NO: 5838 - protein, 7 aa, synthetic construct
  REGION 1..7: note = eblasakimab light chain CDR1
QSISSSY

SEQ ID NO: 5839 - skipped

SEQ ID NO: 5840 - protein, 5 aa, synthetic construct
  REGION 1..5: note = eblasakimab light chain CDR3
QQYAS

SEQ ID NO: 5841 - protein, 123 aa, synthetic construct
  REGION 1..123: note = ebronucimab heavy chain V region
EVQLVESGGGLVQPGRSLRLSCAASGFTFSSYSMNWVRQAPGKGLEWVSGISSSSSYISYADSVQGRFTISRDNGKNSLYLQMNSLRAEDTALYFCAREYDFWSAYYDAFDVWGQGTMVTVSS

SEQ ID NO: 5842 - protein, 8 aa, synthetic construct
  REGION 1..8: note = ebronucimab heavy chain CDR1
GFTFSSYS

SEQ ID NO: 5843 - protein, 9 aa, synthetic construct
  REGION 1..9: note = ebronucimab heavy chain CDR2
ISSSSSYIS

SEQ ID NO: 5844 - protein, 16 aa, synthetic construct
  REGION 1..16: note = ebronucimab heavy chain CDR3
AREYDFWSAYYDAFDV

SEQ ID NO: 5845 - protein, 111 aa, synthetic construct
  REGION 1..111: note = ebronucimab light chain V region
QSELTQPRSVSGSPGQSVTISCTGTSRNIGGGNDVHWYQQHPGKAPKLLISGVIERSSGVPDRFSGSKSGNTASLTISGLQAEDEADYYCQSFDGSLSGSVFGTGTDVTVL

SEQ ID NO: 5846 - protein, 9 aa, synthetic construct
  REGION 1..9: note = ebronucimab light chain CDR1
SRNIGGGND

SEQ ID NO: 5847 - skipped

SEQ ID NO: 5848 - protein, 11 aa, synthetic construct
  REGION 1..11: note = ebronucimab light chain CDR3
QSFDGSLSGSV

SEQ ID NO: 5849 - protein, 122 aa, synthetic construct [sequence omitted]

SEQ ID NO: 5850 - protein, 8 aa, synthetic construct
  REGION 1..8: note = eculizumab heavy chain CDR1
GYIFSNYW

SEQ ID NO: 5851 - protein, 8 aa, synthetic construct
  REGION 1..8: note = eculizumab heavy chain CDR2
ILPGSGST

SEQ ID NO: 5852 - protein, 15 aa, synthetic construct
  REGION 1..15: note = eculizumab heavy chain CDR3
ARYFFGSSPNWYFDV

SEQ ID NO: 5853 - protein, 107 aa, synthetic construct [sequence omitted]

SEQ ID NO: 5854 - protein, 6 aa, synthetic construct
  REGION 1..6: note = eculizumab light chain CDR1
ENIYGA

SEQ ID NO: 5855 - skipped

SEQ ID NO: 5856 - protein, 9 aa, synthetic construct
  REGION 1..9: note = eculizumab light chain CDR3
QNVLNTPLT

SEQ ID NO: 5857 - protein, 124 aa, synthetic construct
  REGION 1..124: note = eldelumab heavy chain V region
QMQLVESGGGVVQPGRSLRLSCTASGFTFSNNGMHWVRQAPGKGLEWVAVIWFDGMNKFYVDSVKGRFTISRDNSKNTLYLEMNSLRAEDTAIYYCAREGDGSGIYYYYGMDVWGQGTTVTVSS

SEQ ID NO: 5858 - protein, 8 aa, synthetic construct
  REGION 1..8: note = eldelumab heavy chain CDR1
GFTFSNNG

SEQ ID NO: 5859 - protein, 8 aa, synthetic construct
  REGION 1..8: note = eldelumab heavy chain CDR2
IWFDGMNK

SEQ ID NO: 5860 - protein, 17 aa, synthetic construct
  REGION 1..17: note = eldelumab heavy chain CDR3
AREGDGSGIYYYYGMDV

SEQ ID NO: 5861 - protein, 109 aa, synthetic construct
  REGION 1..109: note = eldelumab light chain V region
EIVLTQSPGTLSLSPGERATLSCRASQSVSSSYLAWYQQKPGQAPRLLIYGASSRATGIPDRFSGSGSGTDFTLTISRLEPEDFAVYYCQQYGSSPIFTFGPGTKVDIK

SEQ ID NO: 5862 - protein, 7 aa, synthetic construct
  REGION 1..7: note = eldelumab light chain CDR1
QSVSSSY

SEQ ID NO: 5863 - skipped

SEQ ID NO: 5864 - protein, 11 aa, synthetic construct
  REGION 1..11: note = eldelumab light chain CDR3
QQYGSSPIFTF

SEQ ID NO: 5865 - protein, 120 aa, synthetic construct
  REGION 1..120: note = elezanumab heavy chain V region
EVQLVQSGAEVKKPGASVKVSCKASGYTFTSHGISWVRQAPGQGLDWMGWISPYSGNTNYAQKLQGRVTMTTDTSTSTAYMELSSLRSEDTAVYYCARVGSGPYYYMDVWGQGTLVTVSS

SEQ ID NO: 5866 - protein, 8 aa, synthetic construct
  REGION 1..8: note = elezanumab heavy chain CDR1
GYTFTSHG

SEQ ID NO: 5867 - protein, 8 aa, synthetic construct
  REGION 1..8: note = elezanumab heavy chain CDR2
ISPYSGNT

SEQ ID NO: 5868 - protein, 13 aa, synthetic construct
  REGION 1..13: note = elezanumab heavy chain CDR3
ARVGSGPYYYMDV

SEQ ID NO: 5869 - protein, 109 aa, synthetic construct
  REGION 1..109: note = elezanumab light chain V region
QSALTQPRSVSGSPGQSVTISCTGTSSSVGDSIYVSWYQQHPGKAPKLMLYDVTKRPSGVPDRFSGSKSGNTASLTISGLQAEDEADYYCYSYAGTDTLFGGGTKVTVL

SEQ ID NO: 5870 - protein, 8 aa, synthetic construct
  REGION 1..8: note = elezanumab light chain CDR1
SSVGDSIY

SEQ ID NO: 5871 - skipped

SEQ ID NO: 5872 - protein, 9 aa, synthetic construct
  REGION 1..9: note = elezanumab light chain CDR3
YSYAGTDTL

SEQ ID NO: 5873 - protein, 117 aa, synthetic construct
  REGION 1..117: note = elgemtumab heavy chain V region
EVQLLESGGGLVQPGGSLRLSCAASGFTFSSYAMSWVRQAPGKGLEWVSAINSQGKSTYYADSVKGRFTISRDNSKNTLYLQMNSLRAEDTAVYYCARWGDEGFDIWGQGTLVTVSS

SEQ ID NO: 5874 - protein, 8 aa, synthetic construct
  REGION 1..8: note = elgemtumab heavy chain CDR1
GFTFSSYA

SEQ ID NO: 5875 - protein, 8 aa, synthetic construct
  REGION 1..8: note = elgemtumab heavy chain CDR2
INSQGKST

SEQ ID NO: 5876 - protein, 10 aa, synthetic construct
  REGION 1..10: note = elgemtumab heavy chain CDR3
ARWGDEGFDI

SEQ ID NO: 5877 - protein, 107 aa, synthetic construct
  REGION 1..107: note = elgemtumab light chain V region
DIQMTQSPSSLSASVGDRVTITCRASQGISNWLAWYQQKPGKAPKLLIYGASSLQSGVPSRFSGSGSGTDFTLTISSLQPEDFATYYCQQYSSFPTTFGQGTKVEIK

SEQ ID NO: 5878 - protein, 6 aa, synthetic construct
  REGION 1..6: note = elgemtumab light chain CDR1
QGISNW

SEQ ID NO: 5879 - skipped

SEQ ID NO: 5880 - protein, 9 aa, synthetic construct
  REGION 1..9: note = elgemtumab light chain CDR3
QQYSSFPTT

SEQ ID NO: 5881 - protein, 132 aa, synthetic construct
  REGION 1..132: note = elipovimab heavy chain V region
QMQLQESGPGLVKPSETLSLTCSVSGASISDSYWSWIRRSPGKGLEWIGYVHKSGDTNYNPSLKSRVHLSLDTSKNQVSLSLTGVTAADSGKYYCARTLHGRRIYGIVAFNEWFTYFYMDVWGTGTQVTVSS

SEQ ID NO: 5882 - protein, 8 aa, synthetic construct
  REGION 1..8: note = elipovimab heavy chain CDR1
GASISDSY

SEQ ID NO: 5883 - protein, 7 aa, synthetic construct
  REGION 1..7: note = elipovimab heavy chain CDR2
VHKSGDT

SEQ ID NO: 5884 - protein, 26 aa, synthetic construct
  REGION 1..26: note = elipovimab heavy chain CDR3
ARTLHGRRIYGIVAFNEWFTYFYMDV

SEQ ID NO: 5885 - protein, 105 aa, synthetic construct
  REGION 1..105: note = elipovimab light chain V region
SDISVAPGETARISCGEKSLGSRAVQWYQHRAGQAPSLIIYNNQDRPSGIPERFSGSPDSRPGTTATLTITSVEAGDEADYYCHIWDSRVPTKWVFGGGTTLTVL

SEQ ID NO: 5886 - protein, 6 aa, synthetic construct
  REGION 1..6: note = elipovimab light chain CDR1
SLGSRA

SEQ ID NO: 5887 - skipped

SEQ ID NO: 5888 - protein, 13 aa, synthetic construct
  REGION 1..13: note = elipovimab light chain CDR3
CHIWDSRVPTKWV

SEQ ID NO: 5889 - protein, 119 aa, synthetic construct
  REGION 1..119: note = elotuzumab heavy chain V region
EVQLVESGGGLVQPGGSLRLSCAASGFDFSRYWMSWVRQAPGKGLEWIGEINPDSSTINYAPSLKDKFIISRDNAKNSLYLQMNSLRAEDTAVYYCARPDGNYWYFDVWGQGTLVTVSS

SEQ ID NO: 5890 - protein, 8 aa, synthetic construct
  REGION 1..8: note = elotuzumab heavy chain CDR1
GFDFSRYW

SEQ ID NO: 5891 - protein, 8 aa, synthetic construct
  REGION 1..8: note = elotuzumab heavy chain CDR2
INPDSSTI

SEQ ID NO: 5892 - protein, 12 aa, synthetic construct
  REGION 1..12: note = elotuzumab heavy chain CDR3
ARPDGNYWYFDV

SEQ ID NO: 5893 - protein, 107 aa, synthetic construct
  REGION 1..107: note = elotuzumab light chain V region
DIQMTQSPSSLSASVGDRVTITCKASQDVGIAVAWYQQKPGKVPKLLIYWASTRHTGVPDRFSGSGSGTDFTLTISSLQPEDVATYYCQQYSSYPYTFGQGTKVEIK

SEQ ID NO: 5894 - protein, 6 aa, synthetic construct
  REGION 1..6: note = elotuzumab light chain CDR1
QDVGIA

SEQ ID NO: 5895 - skipped

SEQ ID NO: 5896 - protein, 9 aa, synthetic construct
  REGION 1..9: note = elotuzumab light chain CDR3
QQYSSYPYT

SEQ ID NO: 5897 - protein, 115 aa, synthetic construct
  REGION 1..115: note = elranatamab heavy chain V region
EVQLLESGGGLVQPGGSLRLSCAASGFTFSSYPMSWVRQAPGKGLEWVSAIGGSGGSLPYADIVKGRFTISRDNSKNTLYLQMNSLRAEDTAVYYCARYWPMDIWGQGTLVTVSS

SEQ ID NO: 5898 - protein, 8 aa, synthetic construct
  REGION 1..8: note = elranatamab heavy chain CDR1
GFTFSSYP

SEQ ID NO: 5899 - protein, 8 aa, synthetic construct
  REGION 1..8: note = elranatamab heavy chain CDR2
IGGSGGSL

SEQ ID NO: 5900 - protein, 8 aa, synthetic construct
  REGION 1..8: note = elranatamab heavy chain CDR3
ARYWPMDI

SEQ ID NO: 5901 - protein, 108 aa, synthetic construct
  REGION 1..108: note = elranatamab light chain V region
EIVLTQSPGTLSLSPGERATLSCRASQSVSSSYLAWYQQKPGQAPRLLMYDASIRATGIPDRFSGSGSGTDFTLTISRLEPEDFAVYYCQQYQSWPLTFGQGTKVEIK

SEQ ID NO: 5902 - protein, 7 aa, synthetic construct
  REGION 1..7: note = elranatamab light chain CDR1
QSVSSSY

SEQ ID NO: 5903 - skipped

SEQ ID NO: 5904 - protein, 9 aa, synthetic construct
  REGION 1..9: note = elranatamab light chain CDR3
QQYQSWPLT

SEQ ID NO: 5905 - protein, 123 aa, synthetic construct
  REGION 1..123: note = emapalumab heavy chain V region
EVQLLESGGGLVQPGGSLRLSCAASGFTFSSYAMSWVRQAPGKGLEWVSAISGSGGSTYYADSVKGRFTISRDNSKNTLYLQMNSLRAEDTAVYYCAKDGSSGWYVPHWFDPWGQGTLVTVSS

SEQ ID NO: 5906 - protein, 8 aa, synthetic construct
  REGION 1..8: note = emapalumab heavy chain CDR1
GFTFSSYA

SEQ ID NO: 5907 - protein, 8 aa, synthetic construct
  REGION 1..8: note = emapalumab heavy chain CDR2
ISGSGGST

SEQ ID NO: 5908 - protein, 16 aa, synthetic construct
  REGION 1..16: note = emapalumab heavy chain CDR3
AKDGSSGWYVPHWFDP

SEQ ID NO: 5909 - protein, 111 aa, synthetic construct
  REGION 1..111: note = emapalumab light chain V region
NFMLTQPHSVSESPGKTVTISCTRSSGSIASNYVQWYQQRPGSSPTTVIYEDNQRPSGVPDRFSGSIDSSSNSASLTISGLKTEDEADYYCQSYDGSNRWMFGGGTKLTVL

SEQ ID NO: 5910 - protein, 8 aa, synthetic construct
  REGION 1..8: note = emapalumab light chain CDR1
SGSIASNY

SEQ ID NO: 5911 - skipped

SEQ ID NO: 5912 - protein, 10 aa, synthetic construct
  REGION 1..10: note = emapalumab light chain CDR3
QSYDGSNRWM

SEQ ID NO: 5913 - protein, 116 aa, synthetic construct
  REGION 1..116: note = enapotamab heavy chain V region
EVQLLESGGGLVQPGGSLRLSCAASGFTFSSYAMNWVRQAPGKGLEWVSTTSGSGASTYYADSVKGRFTISRDNSKNTLYLQMNSLRAEDTAVYYCAKIWIAFDIWGQGTMVTVSS

SEQ ID NO: 5914 - protein, 8 aa, synthetic construct
  REGION 1..8: note = enapotamab heavy chain CDR1
GFTFSSYA

SEQ ID NO: 5915 - protein, 8 aa, synthetic construct
  REGION 1..8: note = enapotamab heavy chain CDR2
TSGSGAST

SEQ ID NO: 5916 - protein, 9 aa, synthetic construct
  REGION 1..9: note = enapotamab heavy chain CDR3
AKIWIAFDI

SEQ ID NO: 5917 - protein, 108 aa, synthetic construct
  REGION 1..108: note = enapotamab light chain V region
EIVLTQSPGTLSLSPGERATLSCRASQSVSSSYLAWYQQKPGQAPRLLIYGASSRATGIPDRFSGSGSGTDFTLTISRLEPEDFAVYYCQQYGSSPYTFGQGTKLEIK

SEQ ID NO: 5918 - protein, 7 aa, synthetic construct
  REGION 1..7: note = enapotamab light chain CDR1
QSVSSSY

SEQ ID NO: 5919 - skipped

SEQ ID NO: 5920 - protein, 9 aa, synthetic construct
  REGION 1..9: note = enapotamab light chain CDR3
QQYGSSPYT

SEQ ID NO: 5921 - protein, 116 aa, synthetic construct; identical to SEQ ID NO: 5913
  REGION 1..116: note = enapotamab vedotin heavy chain V region

SEQ ID NO: 5922 - protein, 8 aa, synthetic construct
  REGION 1..8: note = enapotamab vedotin heavy chain CDR1
GFTFSSYA

SEQ ID NO: 5923 - protein, 8 aa, synthetic construct
  REGION 1..8: note = enapotamab vedotin heavy chain CDR2
TSGSGAST

SEQ ID NO: 5924 - protein, 9 aa, synthetic construct
  REGION 1..9: note = enapotamab vedotin heavy chain CDR3
AKIWIAFDI

SEQ ID NO: 5925 - protein, 108 aa, synthetic construct; identical to SEQ ID NO: 5917
  REGION 1..108: note = enapotamab vedotin light chain V region

SEQ ID NO: 5926 - protein, 8 aa, synthetic construct
  REGION 1..8: note = enapotamab vedotin light chain CDR1
QSVSSSYL

SEQ ID NO: 5927 - skipped

SEQ ID NO: 5928 - protein, 9 aa, synthetic construct
  REGION 1..9: note = enapotamab vedotin light chain CDR3
QQYGSSPYT

SEQ ID NO: 5929 - protein, 117 aa, synthetic construct
  REGION 1..117: note = enfortumab vedotin heavy chain V region
EVQLVESGGGLVQPGGSLRLSCAASGFTFSSYNMNWVRQAPGKGLEWVSYISSSSSTIYYADSVKGRFTISRDNAKNSLSLQMNSLRDEDTAVYYCARAYYYGMDVWGQGTTVTVSS

SEQ ID NO: 5930 - protein, 8 aa, synthetic construct
  REGION 1..8: note = enfortumab vedotin heavy chain CDR1
GFTFSSYN

SEQ ID NO: 5931 - protein, 8 aa, synthetic construct
  REGION 1..8: note = enfortumab vedotin heavy chain CDR2
ISSSSSTI

SEQ ID NO: 5932 - protein, 10 aa, synthetic construct
  REGION 1..10: note = enfortumab vedotin heavy chain CDR3
ARAYYYGMDV

SEQ ID NO: 5933 - protein, 107 aa, synthetic construct
  REGION 1..107: note = enfortumab vedotin light chain V region
DIQMTQSPSSVSASVGDRVTITCRASQGISGWLAWYQQKPGKAPKFLIYAASTLQSGVPSRFSGSGSGTDFTLTISSLQPEDFATYYCQQANSFPPTFGGGTKVEIK

SEQ ID NO: 5934 - protein, 6 aa, synthetic construct
  REGION 1..6: note = enfortumab vedotin light chain CDR1
QGISGW

SEQ ID NO: 5935 - skipped

SEQ ID NO: 5936 - protein, 9 aa, synthetic construct
  REGION 1..9: note = enfortumab vedotin light chain CDR3
QQANSFPPT

SEQ ID NO: 5937 - protein, 122 aa, synthetic construct
  REGION 1..122: note = enoblituzumab heavy chain V region
EVQLVESGGGLVQPGGSLRLSCAASGFTFSSFGMHWVRQAPGKGLEWVAYISSDSSAIYYADTVKGRFTISRDNAKNSLYLQMNSLRDEDTAVYYCGRGRENIYYGSRLDYWGQGTTVTVSS

SEQ ID NO: 5938 - protein, 8 aa, synthetic construct
  REGION 1..8: note = enoblituzumab heavy chain CDR1
GFTFSSFG

SEQ ID NO: 5939 - protein, 8 aa, synthetic construct
  REGION 1..8: note = enoblituzumab heavy chain CDR2
ISSDSSAI

SEQ ID NO: 5940 - protein, 15 aa, synthetic construct
  REGION 1..15: note = enoblituzumab heavy chain CDR3
GRGRENIYYGSRLDY

SEQ ID NO: 5941 - protein, 107 aa, synthetic construct
  REGION 1..107: note = enoblituzumab light chain V region
DIQLTQSPSFLSASVGDRVTITCKASQNVDTNVAWYQQKPGKAPKALIYSASYRYSGVPSRFSGSGSGTDFTLTISSLQPEDFATYYCQQYNNYPFTFGQGTKLEIK

SEQ ID NO: 5942 - protein, 7 aa, synthetic construct
  REGION 1..7: note = enoblituzumab light chain CDR1
QNVDTNV

SEQ ID NO: 5943 - skipped

SEQ ID NO: 5944 - protein, 9 aa, synthetic construct
  REGION 1..9: note = enoblituzumab light chain CDR3
QQYNNYPFT

SEQ ID NO: 5945 - protein, 123 aa, synthetic construct
  REGION 1..123: note = enoticumab heavy chain V region
QVQLVESGGGVVQPGRSLRLSCAASGFTFSSYGMHWVRQAPGKGLEWVSFLWYDGTNKNYVESVKGRFTISRDNSKNMLYLEMNSLRAEDTAVYYCARDHDFRSGYEGWFDPWGQGTLVTVSS

SEQ ID NO: 5946 - protein, 7 aa, synthetic construct
  REGION 1..7: note = enoticumab heavy chain CDR1
GFTFSSY

SEQ ID NO: 5947 - protein, 8 aa, synthetic construct
  REGION 1..8: note = enoticumab heavy chain CDR2
LWYDGTNK

SEQ ID NO: 5948 - protein, 16 aa, synthetic construct
  REGION 1..16: note = enoticumab heavy chain CDR3
ARDHDFRSGYEGWFDP

SEQ ID NO: 5949 - protein, 107 aa, synthetic construct
  REGION 1..107: note = enoticumab light chain V region
EIVLTQSPATLSLSPGERATLSCRASQSVSSYLAWYQQKPGQAPRLLIYDASNRATGIPARFSGSGSGTDFTLTISSLEPEDFAVYYCQHRSNWPPTFGGGTKVEIK

SEQ ID NO: 5950 - protein, 7 aa, synthetic construct
  REGION 1..7: note = enoticumab light chain CDR1
QSVSSYL

SEQ ID NO: 5951 - skipped

SEQ ID NO: 5952 - protein, 9 aa, synthetic construct
  REGION 1..9: note = enoticumab light chain CDR3
QHRSNWPPT

SEQ ID NO: 5953 - protein, 118 aa, synthetic construct
  REGION 1..118: note = enuzovimab heavy chain V region
EVQLVESGGGLIQPGGSLRLSCAASGFIVSSNYMSWVRQAPGKGLEWVSIIYSGGSTFYADSVKGRFTISRDNSKNTLYLQMNSLRVEDTAVYYCARDLQELGSLDYWGQGTLVTVSS

SEQ ID NO: 5954 - protein, 8 aa, synthetic construct
  REGION 1..8: note = enuzovimab heavy chain CDR1
GFIVSSNY

SEQ ID NO: 5955 - protein, 7 aa, synthetic construct
  REGION 1..7: note = enuzovimab heavy chain CDR2
IYSGGST

SEQ ID NO: 5956 - protein, 12 aa, synthetic construct
  REGION 1..12: note = enuzovimab heavy chain CDR3
ARDLQELGSLDY

SEQ ID NO: 5957 - protein, 107 aa, synthetic construct
  REGION 1..107: note = enuzovimab light chain V region
DIQMTQSPSSVSASVGDRVTITCRASQGISSWLAWYQQKPGKAPKLLIYAASSLQSGVPSRFSGSGSGTDFTLTISSLQPEDFATYYCQEANSFPYTFGQGTKLEIK

SEQ ID NO: 5958 - protein, 6 aa, synthetic construct
  REGION 1..6: note = enuzovimab light chain CDR1
QGISSW

SEQ ID NO: 5959 - skipped

SEQ ID NO: 5960 - protein, 9 aa, synthetic construct
  REGION 1..9: note = enuzovimab light chain CDR3
QEANSFPYT

SEQ ID NO: 5961 - protein, 125 aa, synthetic construct
  REGION 1..125: note = epcoritamab heavy chain V region
EVKLVESGGGLVQPGGSLRLSCAASGFTFNTYAMNWVRQAPGKGLEWVARIRSKYNNYATYYADSVKDRFTISRDDSKSSLYLQMNNLKTEDTAMYYCVRHGNFGNSYVSWFAYWGQGTLVTVSS

SEQ ID NO: 5962 - protein, 8 aa, synthetic construct
  REGION 1..8: note = epcoritamab heavy chain CDR1
GFTFNTYA

SEQ ID NO: 5963 - protein, 10 aa, synthetic construct
  REGION 1..10: note = epcoritamab heavy chain CDR2
IRSKYNNYAT

SEQ ID NO: 5964 - protein, 16 aa, synthetic construct
  REGION 1..16: note = epcoritamab heavy chain CDR3
VRHGNFGNSYVSWFAY

SEQ ID NO: 5965 - protein, 109 aa, synthetic construct
  REGION 1..109: note = epcoritamab light chain V region
QAVVTQEPSFSVSPGGTVTLTCRSSTGAVTTSNYANWVQQTPGQAFRGLIGGTNKRAPGVPARFSGSLIGDKAALTITGAQADDESIYFCALWYSNLWVFGGGTKLTVL

SEQ ID NO: 5966 - protein, 9 aa, synthetic construct
  REGION 1..9: note = epcoritamab light chain CDR1
TGAVTTSNY

SEQ ID NO: 5967 - skipped

SEQ ID NO: 5968 - protein, 9 aa, synthetic construct
  REGION 1..9: note = epcoritamab light chain CDR3
ALWYSNLWV

SEQ ID NO: 5969 - protein, 111 aa, synthetic construct
  REGION 1..111: note = eptinezumab heavy chain V region
EVQLVESGGGLVQPGGSLRLSCAVSGIDLSGYYMNWVRQAPGKGLEWVGVIGINGATYYASWAKGRFTISRDNSKTTVYLQMNSLRAEDTAVYFCARGDIWGQGTLVTVSS

SEQ ID NO: 5970 - protein, 8 aa, synthetic construct
  REGION 1..8: note = eptinezumab heavy chain CDR1
GIDLSGYY

SEQ ID NO: 5971 - protein, 7 aa, synthetic construct
  REGION 1..7: note = eptinezumab heavy chain CDR2
IGINGAT

SEQ ID NO: 5972 - protein, 5 aa, synthetic construct
  REGION 1..5: note = eptinezumab heavy chain CDR3
ARGDI

SEQ ID NO: 5973 - protein, 112 aa, synthetic construct
  REGION 1..112: note = eptinezumab light chain V region
QVLTQSPSSLSASVGDRVTINCQASQSVYHNTYLAWYQQKPGKVPKQLIYDASTLASGVPSRFSGSGSGTDFTLTISSLQPEDVATYYCLGSYDCTNGDCFVFGGGTKVEIK

SEQ ID NO: 5974 - protein, 7 aa, synthetic construct
  REGION 1..7: note = eptinezumab light chain CDR1
QSVYHNT

SEQ ID NO: 5975 - skipped

SEQ ID NO: 5976 - protein, 13 aa, synthetic construct
  REGION 1..13: note = eptinezumab light chain CDR3
LGSYDCTNGDCFV

SEQ ID NO: 5977 - protein, 130 aa, synthetic construct [sequence omitted]

SEQ ID NO: 5978 - protein, 8 aa, synthetic construct
  REGION 1..8: note = erenumab heavy chain CDR1
GFTFSSFG

SEQ ID NO: 5979 - protein, 8 aa, synthetic construct
  REGION 1..8: note = erenumab heavy chain CDR2
ISFDGSIK

SEQ ID NO: 5980 - protein, 23 aa, synthetic construct
  REGION 1..23: note = erenumab heavy chain CDR3
ARDRLNYYDSSGYYHYKYYGMAV

SEQ ID NO: 5981 - protein, 110 aa, synthetic construct
  REGION 1..110: note = erenumab light chain V region
QSVLTQPPSVSAAPGQKVTISCSGSSSNIGNNYVSWYQQLPGTAPKLLIYDNNKRPSGIPDRFSGSKSGTSTTLGITGLQTGDEADYYCGTWDSRLSAVVFGGGTKLTVL

SEQ ID NO: 5982 - protein, 8 aa, synthetic construct
  REGION 1..8: note = erenumab light chain CDR1
SSNIGNNY

SEQ ID NO: 5983 - skipped

SEQ ID NO: 5984 - protein, 11 aa, synthetic construct
  REGION 1..11: note = erenumab light chain CDR3
GTWDSRLSAVV

SEQ ID NO: 5985 - protein, 117 aa, synthetic construct
  REGION 1..117: note = etaracizumab heavy chain V region
QVQLVESGGGVVQPGRSLRLSCAASGFTFSSYDMSWVRQAPGKGLEWVAKVSSGGGSTYYLDTVQGRFTISRDNSKNTLYLQMNSLRAEDTAVYYCARHLHGSFASWGQGTTVTVSS

SEQ ID NO: 5986 - protein, 8 aa, synthetic construct
  REGION 1..8: note = etaracizumab heavy chain CDR1
GFTFSSYD

SEQ ID NO: 5987 - protein, 8 aa, synthetic construct
  REGION 1..8: note = etaracizumab heavy chain CDR2
VSSGGGST

SEQ ID NO: 5988 - protein, 10 aa, synthetic construct
  REGION 1..10: note = etaracizumab heavy chain CDR3
ARHLHGSFAS

SEQ ID NO: 5989 - protein, 107 aa, synthetic construct
  REGION 1..107: note = etaracizumab light chain V region
EIVLTQSPATLSLSPGERATLSCQASQSISNFLHWYQQRPGQAPRLLIRYRSQSISGIPARFSGSGSGTDFTLTISSLEPEDFAVYYCQQSGSWPLTFGGGTKVEIK

SEQ ID NO: 5990 - protein, 6 aa, synthetic construct
  REGION 1..6: note = etaracizumab light chain CDR1
QSISNF

SEQ ID NO: 5991 - skipped

SEQ ID NO: 5992 - protein, 9 aa, synthetic construct
  REGION 1..9: note = etaracizumab light chain CDR3
QQSGSWPLT

SEQ ID NO: 5993 - protein, 119 aa, synthetic construct; identical to SEQ ID NO: 444
  REGION 1..119: note = etesevimab heavy chain V region

SEQ ID NO: 5994 - protein, 8 aa, synthetic construct
  REGION 1..8: note = etesevimab heavy chain CDR1
GFTVSSNY

SEQ ID NO: 5995 - protein, 7 aa, synthetic construct
  REGION 1..7: note = etesevimab heavy chain CDR2
IYSGGST

SEQ ID NO: 5996 - protein, 13 aa, synthetic construct
  REGION 1..13: note = etesevimab heavy chain CDR3
ARVLPMYGDYLDY

SEQ ID NO: 5997 - protein, 109 aa, synthetic construct; identical to SEQ ID NO: 443
  REGION 1..109: note = etesevimab light chain V region

SEQ ID NO: 5998 - protein, 6 aa, synthetic construct
  REGION 1..6: note = etesevimab light chain CDR1
QSISRY

SEQ ID NO: 5999 - skipped

SEQ ID NO: 6000 - protein, 11 aa, synthetic construct
  REGION 1..11: note = etesevimab light chain CDR3
QQSYSTPPEYT

SEQ ID NO: 6001 - protein, 126 aa, synthetic construct
  REGION 1..126: note = evinacumab heavy chain V region
EVQLVESGGGVIQPGGSLRLSCAASGFTFDDYAMNWVRQGPGKGLEWVSAISGDGGSTYYADSVKGRFTISRDNSKNSLYLQMNSLRAEDTAFFYCAKDLRNTIFGVVIPDAFDIWGQGTMVTVSS

SEQ ID NO: 6002 - protein, 8 aa, synthetic construct
  REGION 1..8: note = evinacumab heavy chain CDR1
GFTFDDYA

SEQ ID NO: 6003 - protein, 8 aa, synthetic construct
  REGION 1..8: note = evinacumab heavy chain CDR2
ISGDGGST

SEQ ID NO: 6004 - protein, 19 aa, synthetic construct
  REGION 1..19: note = evinacumab heavy chain CDR3
AKDLRNTIFGVVIPDAFDI

SEQ ID NO: 6005 - protein, 107 aa, synthetic construct
  REGION 1..107: note = evinacumab light chain V region
DIQMTQSPSTLSASVGDRVTITCRASQSIRSWLAWYQQKPGKAPKLLIYKASSLESGVPSRFSGSGSGTEFTLTISSLQPDDFATYYCQQYNSYSYTFGQGTKLEIK

SEQ ID NO: 6006 - protein, 6 aa, synthetic construct
  REGION 1..6: note = evinacumab light chain CDR1
QSIRSW

SEQ ID NO: 6007 - skipped

SEQ ID NO: 6008 - protein, 9 aa, synthetic construct
  REGION 1..9: note = evinacumab light chain CDR3
QQYNSYSYT

SEQ ID NO: 6009 - protein, 115 aa, synthetic construct [sequence omitted]

SEQ ID NO: 6010 - protein, 8 aa, synthetic construct
  REGION 1..8: note = evolocumab heavy chain CDR1
GYTLTSYG

SEQ ID NO: 6011 - protein, 8 aa, synthetic construct
  REGION 1..8: note = evolocumab heavy chain CDR2
VSFYNGNT

SEQ ID NO: 6012 - protein, 8 aa, synthetic construct
  REGION 1..8: note = evolocumab heavy chain CDR3
ARGYGMDV

SEQ ID NO: 6013 - protein, 109 aa, synthetic construct [sequence omitted]

SEQ ID NO: 6014 - protein, 8 aa, synthetic construct
  REGION 1..8: note = evolocumab light chain CDR1
SSDVGGYN

SEQ ID NO: 6015 - skipped

SEQ ID NO: 6016 - protein, 9 aa, synthetic construct
  REGION 1..9: note = evolocumab light chain CDR3
NSYTSTSMV

SEQ ID NO: 6017 - protein, 127 aa, synthetic construct
  REGION 1..127: note = exevolimab heavy chain V region
EVQLVESGGGLVQPGGSLRLSCAASGFTFSNYAMNWVRQAPGKGLEWVSTISGSGGATRYADSVKGRFTISRDNSRNTVYLQMNSLRVEDTAVFYCTKDRLIMATVRGPYYYGMDVWGQGTTVTVSS

SEQ ID NO: 6018 - protein, 8 aa, synthetic construct
  REGION 1..8: note = exevolimab heavy chain CDR1
GFTFSNYA

SEQ ID NO: 6019 - protein, 8 aa, synthetic construct
  REGION 1..8: note = exevolimab heavy chain CDR2
ISGSGGAT

SEQ ID NO: 6020 - protein, 20 aa, synthetic construct
  REGION 1..20: note = exevolimab heavy chain CDR3
TKDRLIMATVRGPYYYGMDV

SEQ ID NO: 6021 - protein, 107 aa, synthetic construct
  REGION 1..107: note = exevolimab light chain V region
DIQMTQSPSSLSASVGDRVTITCRASQSISSYLNWYQQKPGKAPNLLIYAASSLQSGVPSRFSGSGSETDFTLTISSLQPEDFATYYCQQSHSVSFTFGPGTKVDIK

SEQ ID NO: 6022 - protein, 6 aa, synthetic construct
  REGION 1..6: note = exevolimab light chain CDR1
QSISSY

SEQ ID NO: 6023 - skipped

SEQ ID NO: 6024 - protein, 9 aa, synthetic construct
  REGION 1..9: note = exevolimab light chain CDR3
QQSHSVSFT

SEQ ID NO: 6025 - protein, 120 aa, synthetic construct
  REGION 1..120: note = exidavnemab heavy chain V region
EVQLVESGGGLVKPGGSLRLSCAASGFTFSDYWMHWVRQAPGKGLEWVGHIKSKTDAGTTDYAAPVKGRFTISRDDSKNTLYLQMNSLKTEDTAVYYCAREIYYYAFDSWGQGTLVTVSS

SEQ ID NO: 6026 - protein, 8 aa, synthetic construct
  REGION 1..8: note = exidavnemab heavy chain CDR1
GFTFSDYW

SEQ ID NO: 6027 - protein, 10 aa, synthetic construct
  REGION 1..10: note = exidavnemab heavy chain CDR2
IKSKTDAGTT

SEQ ID NO: 6028 - protein, 11 aa, synthetic construct
  REGION 1..11: note = exidavnemab heavy chain CDR3
AREIYYYAFDS

SEQ ID NO: 6029 - protein, 107 aa, synthetic construct
  REGION 1..107: note = exidavnemab light chain V region
SYELTQPLSVSVALGQTARITCSGDNIGSKYVHWYQQKPGQAPVLVIYGDNERPSGIPERFSGSNSGNTATLTISRAQAGDEADYYCQAADWVDFYVFGGGTKLTVL

SEQ ID NO: 6030 - protein, 6 aa, synthetic construct
  REGION 1..6: note = exidavnemab light chain CDR1
NIGSKY

SEQ ID NO: 6031 - skipped

SEQ ID NO: 6032 - protein, 10 aa, synthetic construct
  REGION 1..10: note = exidavnemab light chain CDR3
QAADWVDFYV

SEQ ID NO: 6033 - protein, 123 aa, synthetic construct [sequence omitted]

SEQ ID NO: 6034 - protein, 8 aa, synthetic construct
  REGION 1..8: note = faricimab heavy chain CDR1
GYDFTHYG

SEQ ID NO: 6035 - protein, 8 aa, synthetic construct
  REGION 1..8: note = faricimab heavy chain CDR2
INTYTGEP

SEQ ID NO: 6036 - protein, 16 aa, synthetic construct
  REGION 1..16: note = faricimab heavy chain CDR3
AKYPYYYGTSHWYFDV

SEQ ID NO: 6037 - protein, 107 aa, synthetic construct [sequence omitted]

SEQ ID NO: 6038 - protein, 6 aa, synthetic construct
  REGION 1..6: note = faricimab light chain CDR1
QDISNY

SEQ ID NO: 6039 - skipped

SEQ ID NO: 6040 - protein, 9 aa, synthetic construct
  REGION 1..9: note = faricimab light chain CDR3
QQYSTVPWT

SEQ ID NO: 6041 - protein, 119 aa, synthetic construct [sequence omitted]

SEQ ID NO: 6042 - protein, 8 aa, synthetic construct
  REGION 1..8: note = fasinumab heavy chain CDR1
GFTLTELS

SEQ ID NO: 6043 - protein, 8 aa, synthetic construct
  REGION 1..8: note = fasinumab heavy chain CDR2
FDPEDGET

SEQ ID NO: 6044 - protein, 12 aa, synthetic construct
  REGION 1..12: note = fasinumab heavy chain CDR3
STIFGVVTNFDN

SEQ ID NO: 6045 - protein, 107 aa, synthetic construct [sequence omitted]

SEQ ID NO: 6046 - protein, 6 aa, synthetic construct
  REGION 1..6: note = fasinumab light chain CDR1
QAIRND

SEQ ID NO: 6047 - skipped

SEQ ID NO: 6048 - protein, 9 aa, synthetic construct
  REGION 1..9: note = fasinumab light chain CDR3
QQYNRYPWT

SEQ ID NO: 6049 - protein, 121 aa, synthetic construct
  REGION 1..121: note = fezakinumab heavy chain V region
QVQLVQSGAEVKKPGASVKVSCKASGYTFTNYYMHWVRQAPGQGLEWVGWINPYTGSAFYAQKFRGRVTMTRDTSISTAYMELSRLRSDDTAVYYCAREPEKFDSDDSDVWGRGTLVTVSS

SEQ ID NO: 6050 - protein, 8 aa, synthetic construct
  REGION 1..8: note = fezakinumab heavy chain CDR1
GYTFTNYY

SEQ ID NO: 6051 - protein, 8 aa, synthetic construct
  REGION 1..8: note = fezakinumab heavy chain CDR2
INPYTGSA

SEQ ID NO: 6052 - protein, 14 aa, synthetic construct
  REGION 1..14: note = fezakinumab heavy chain CDR3
AREPEKFDSDDSDV

SEQ ID NO: 6053 - protein, 111 aa, synthetic construct
  REGION 1..111: note = fezakinumab light chain V region
QAVLTQPPSVSGAPGQRVTISCTGSSSNIGAGYGVHWYQQLPGTAPKLLIYGDSNRPSGVPDRFSGSKSGTSASLAITGLQAEDEADYYCQSYDNSLSGYVFGGGTQLTVL

SEQ ID NO: 6054-6056 - skipped (3 entries)

SEQ ID NO: 6057 - protein, 123 aa, synthetic construct
  REGION 1..123: note = fianlimab heavy chain V region
QVQLVESGGGVVQPGRSLRLSCVASGFTFSSYGMHWVRQAPGKGLEWVAIIWYDGSNKYYADSVKGRFTISRDNSKNTQYLQMNSLRAEDTAVYYCASVATSGDFDYYGMDVWGQGTTVTVSS

SEQ ID NO: 6058 - protein, 7 aa, synthetic construct
  REGION 1..7: note = fianlimab heavy chain CDR1
GFTFSSY

SEQ ID NO: 6059 - protein, 8 aa, synthetic construct
  REGION 1..8: note = fianlimab heavy chain CDR2
IWYDGSNK

SEQ ID NO: 6060 - protein, 16 aa, synthetic construct
  REGION 1..16: note = fianlimab heavy chain CDR3
ASVATSGDFDYYGMDV

SEQ ID NO: 6061 - protein, 107 aa, synthetic construct
  REGION 1..107: note = fianlimab light chain V region
EIVLTQSPATLSLSPGERTTLSCRASQRISTYLAWYQQKPGQAPRLLIYDASKRATGIPARFSGSGSGTGFTLTISSLEPEDFAVYYCQQRSNWPLTFGGGTKVEIK

SEQ ID NO: 6062 - protein, 7 aa, synthetic construct
  REGION 1..7: note = fianlimab light chain CDR1
QRISTYL

SEQ ID NO: 6063 - skipped

SEQ ID NO: 6064 - protein, 9 aa, synthetic construct
  REGION 1..9: note = fianlimab light chain CDR3
QQRSNWPLT

SEQ ID NO: 6065 - protein, 120 aa, synthetic construct
  REGION 1..120: note = fidasimtamab heavy chain V region
QVQLVQSGAEVKKPGSSVKVSCKASGGTFSSTAISWVRQAPGQGLEWMGGIWPSFGTASYAQKFQGRVTITADESTSTAYMELSSLRSEDTAVYYCARAEYSSTGIFDYWGQGTLVTVSS

SEQ ID NO: 6066 - protein, 8 aa, synthetic construct
  REGION 1..8: note = fidasimtamab heavy chain CDR1
GGTFSSTA

SEQ ID NO: 6067 - protein, 9 aa, synthetic construct
  REGION 1..9: note = fidasimtamab heavy chain CDR2
IWPSFGTAS

SEQ ID NO: 6068 - protein, 13 aa, synthetic construct
  REGION 1..13: note = fidasimtamab heavy chain CDR3
ARAEYSSTGIFDY

SEQ ID NO: 6069 - protein, 107 aa, synthetic construct
  REGION 1..107: note = fidasimtamab light chain V region
DIQMTQSPSSVSASVGDRVTITCRASQGISSWLAWYQQKPGKAPKLLISAASSLQSGVPSRFSGSGSGTDFTLTISSLQPEDFATYYCQQANHLPFTFGGGTKVEIK

SEQ ID NO: 6070 - protein, 6 aa, synthetic construct
  REGION 1..6: note = fidasimtamab light chain CDR1
QGISSW

SEQ ID NO: 6071 - skipped

SEQ ID NO: 6072 - protein, 9 aa, synthetic construct
  REGION 1..9: note = fidasimtamab light chain CDR3
QQANHLPFT

SEQ ID NO: 6073 - protein, 125 aa, synthetic construct [sequence omitted]

SEQ ID NO: 6074 - protein, 7 aa, synthetic construct
  REGION 1..7: note = figitumumab heavy chain CDR1
GFTFSSY

SEQ ID NO: 6075 - protein, 8 aa, synthetic construct
  REGION 1..8: note = figitumumab heavy chain CDR2
ISGSGGTT

SEQ ID NO: 6076 - protein, 18 aa, synthetic construct
  REGION 1..18: note = figitumumab heavy chain CDR3
AKDLGWSDSYYYYYGMDV

SEQ ID NO: 6077 - protein, 107 aa, synthetic construct [sequence omitted]

SEQ ID NO: 6078 - protein, 6 aa, synthetic construct
  REGION 1..6: note = figitumumab light chain CDR1
QGIRND

SEQ ID NO: 6079 - skipped

SEQ ID NO: 6080 - protein, 9 aa, synthetic construct
  REGION 1..9: note = figitumumab light chain CDR3
LQHNSYPCS

SEQ ID NO: 6081 - protein, 123 aa, synthetic construct
  REGION 1..123: note = firivumab heavy chain V region
QVQLVQSGAEVKMPGSSVKVSCKTSGVFFSSHAISWVRQAPGQGLEWMGGISPMFGTTHYAQKFQGRVTITADQSTTTAYMELTSLTSEDTAVYYCARDGAGSYYPLNWFDPWGQGTLVTVSS

SEQ ID NO: 6082 - protein, 8 aa, synthetic construct
  REGION 1..8: note = firivumab heavy chain CDR1
GVFFSSHA

SEQ ID NO: 6083 - protein, 8 aa, synthetic construct
  REGION 1..8: note = firivumab heavy chain CDR2
ISPMFGTT

SEQ ID NO: 6084 - protein, 16 aa, synthetic construct
  REGION 1..16: note = firivumab heavy chain CDR3
ARDGAGSYYPLNWFDP

SEQ ID NO: 6085 - protein, 107 aa, synthetic construct
  REGION 1..107: note = firivumab light chain V region
EIVLTQSPATLSLSPGERATLSCRASENIWNNLAWYQQKPGQAPRLLISGASTGATGVPSRFRGSGSRTEFTLTISSLQSEDFAIYFCQQYNSWPRTFGPGTKVEIK

SEQ ID NO: 6086 - protein, 6 aa, synthetic construct
  REGION 1..6: note = firivumab light chain CDR1
ENIWNN

SEQ ID NO: 6087 - skipped

SEQ ID NO: 6088 - protein, 9 aa, synthetic construct
  REGION 1..9: note = firivumab light chain CDR3
QQYNSWPRT

SEQ ID NO: 6089 - protein, 119 aa, synthetic construct
  REGION 1..119: note = flanvotumab heavy chain V region
QVQLVQSGSELKKPGASVKISCKASGYTFTSYAMNWVRQAPGQGLESMGWINTNTGNPTYAQGFTGRFVFSMDTSVSTAYLQISSLKAEDTAIYYCAPRYSSSWYLDYWGQGTLVTVSS

SEQ ID NO: 6090 - protein, 7 aa, synthetic construct
  REGION 1..7: note = flanvotumab heavy chain CDR1
GYTFTSY

SEQ ID NO: 6091 - protein, 8 aa, synthetic construct
  REGION 1..8: note = flanvotumab heavy chain CDR2
INTNTGNP

SEQ ID NO: 6092 - protein, 12 aa, synthetic construct
  REGION 1..12: note = flanvotumab heavy chain CDR3
APRYSSSWYLDY

SEQ ID NO: 6093 - protein, 108 aa, synthetic construct
  REGION 1..108: note = flanvotumab light chain V region
EIVLTQSPATLSLSPGERATLSCRASQSVSSYLAWYQQKPGQAPRLLIYDASNRATGIPARFSGSGSGTDFTLTISSLEPEDFAVYYCQQRSNWLMYTFGQGTKLEIK

SEQ ID NO: 6094 - protein, 6 aa, synthetic construct
  REGION 1..6: note = flanvotumab light chain CDR1
QSVSSY

SEQ ID NO: 6095 - skipped

SEQ ID NO: 6096 - protein, 10 aa, synthetic construct
  REGION 1..10: note = flanvotumab light chain CDR3
QQRSNWLMYT

SEQ ID NO: 6097 - protein, 127 aa, synthetic construct [sequence omitted]

SEQ ID NO: 6098 - protein, 8 aa, synthetic construct
  REGION 1..8: note = fletikumab heavy chain CDR1
GYTFTNDI

SEQ ID NO: 6099 - protein, 8 aa, synthetic construct
  REGION 1..8: note = fletikumab heavy chain CDR2
INAGYGNT

SEQ ID NO: 6100 - protein, 20 aa, synthetic construct
  REGION 1..20: note = fletikumab heavy chain CDR3
AREPLWFGESSPHDYYGMDV

SEQ ID NO: 6101 - protein, 107 aa, synthetic construct [sequence omitted]

SEQ ID NO: 6102 - protein, 6 aa, synthetic construct
  REGION 1..6: note = fletikumab light chain CDR1
QGISSA

SEQ ID NO: 6103 - skipped

SEQ ID NO: 6104 - protein, 9 aa, synthetic construct
  REGION 1..9: note = fletikumab light chain CDR3
QQFNSYPLT

SEQ ID NO: 6105 - protein, 118 aa, synthetic construct [sequence omitted]

SEQ ID NO: 6106 - protein, 8 aa, synthetic construct
  REGION 1..8: note = foralumab heavy chain CDR1
GFKFSGYG

SEQ ID NO: 6107 - protein, 8 aa, synthetic construct
  REGION 1..8: note = foralumab heavy chain CDR2
IWYDGSKK

SEQ ID NO: 6108 - protein, 11 aa, synthetic construct
  REGION 1..11: note = foralumab heavy chain CDR3
ARQMGYWHFDL

SEQ ID NO: 6109 - protein, 108 aa, synthetic construct [sequence omitted]

SEQ ID NO: 6110 - protein, 6 aa, synthetic construct
  REGION 1..6: note = foralumab light chain CDR1
QSVSSY

SEQ ID NO: 6111 - skipped

SEQ ID NO: 6112 - protein, 10 aa, synthetic construct
  REGION 1..10: note = foralumab light chain CDR3
QQRSNWPPLT

SEQ ID NO: 6113 - protein, 119 aa, synthetic construct
  REGION 1..119: note = foravirumab heavy chain V region
QVQLVESGGGAVQPGRSLRLSCAASGFTFSSYGMHWVRQAPGKGLEWVAVILYDGSDKFYADSVKGRFTISRDNSKNTLYLQMNSLRAEDTAVYYCAKVAVAGTHFDYWGQGTLVTVSS

SEQ ID NO: 6114 - protein, 7 aa, synthetic construct
  REGION 1..7: note = foravirumab heavy chain CDR1
GFTFSSY

SEQ ID NO: 6115 - protein, 8 aa, synthetic construct
  REGION 1..8: note = foravirumab heavy chain CDR2
ILYDGSDK

SEQ ID NO: 6116 - protein, 12 aa, synthetic construct
  REGION 1..12: note = foravirumab heavy chain CDR3
AKVAVAGTHFDY

SEQ ID NO: 6117 - protein, 107 aa, synthetic construct
  REGION 1..107: note = foravirumab light chain V region
DIQMTQSPSSLSASVGDRVTITCRASQGIRNDLGWYQQKPGKAPKLLIYAASSLQSGVPSRFSGSGSGTDFTLTISSLQPEDFATYYCQQLNSYPPTFGGGTKVEIK

SEQ ID NO: 6118 - protein, 6 aa, synthetic construct
  REGION 1..6: note = foravirumab light chain CDR1
QGIRND

SEQ ID NO: 6119 - skipped

SEQ ID NO: 6120 - protein, 9 aa, synthetic construct
  REGION 1..9: note = foravirumab light chain CDR3
QQLNSYPPT

SEQ ID NO: 6121 - protein, 122 aa, synthetic construct
  REGION 1..122: note = fremanezumab heavy chain V region
EVQLVESGGGLVQPGGSLRLSCAASGFTFSNYWISWVRQAPGKGLEWVAEIRSESDASATHYAEAVKGRFTISRDNAKNSLYLQMNSLRAEDTAVYYCLAYFDYGLAIQNYWGQGTLVTVSS

SEQ ID NO: 6122 - protein, 8 aa, synthetic construct
  REGION 1..8: note = fremanezumab heavy chain CDR1
GFTFSNYW

SEQ ID NO: 6123 - protein, 10 aa, synthetic construct
  REGION 1..10: note = fremanezumab heavy chain CDR2
IRSESDASAT

SEQ ID NO: 6124 - protein, 13 aa, synthetic construct
  REGION 1..13: note = fremanezumab heavy chain CDR3
LAYFDYGLAIQNY

SEQ ID NO: 6125 - protein, 107 aa, synthetic construct
  REGION 1..107: note = fremanezumab light chain V region
EIVLTQSPATLSLSPGERATLSCKASKRVTTYVSWYQQKPGQAPRLLIYGASNRYLGIPARFSGSGSGTDFTLTISSLEPEDFAVYYCSQSYNYPYTFGQGTKLEIK

SEQ ID NO: 6126 - protein, 6 aa, synthetic construct
  REGION 1..6: note = fremanezumab light chain CDR1
KRVTTY

SEQ ID NO: 6127 - skipped

SEQ ID NO: 6128 - protein, 9 aa, synthetic construct
  REGION 1..9: note = fremanezumab light chain CDR3
SQSYNYPYT

SEQ ID NO: 6129 - protein, 120 aa, synthetic construct
  REGION 1..120: note = fresolimumab heavy chain V region
QVQLVQSGAEVKKPGSSVKVSCKASGYTFSSNVISWVRQAPGQGLEWMGGVIPIVDIANYAQRFKGRVTITADESTSTTYMELSSLRSEDTAVYYCASTLGLVLDAMDYWGQGTLVTVSS

SEQ ID NO: 6130 - protein, 8 aa, synthetic construct
  REGION 1..8: note = fresolimumab heavy chain CDR1
GYTFSSNV

SEQ ID NO: 6131 - protein, 8 aa, synthetic construct
  REGION 1..8: note = fresolimumab heavy chain CDR2
VIPIVDIA

SEQ ID NO: 6132 - protein, 13 aa, synthetic construct
  REGION 1..13: note = fresolimumab heavy chain CDR3
ASTLGLVLDAMDY

SEQ ID NO: 6133 - protein, 108 aa, synthetic construct
  REGION 1..108: note = fresolimumab light chain V region
ETVLTQSPGTLSLSPGERATLSCRASQSLGSSYLAWYQQKPGQAPRLLIYGASSRAPGIPDRFSGSGSGTDFTLTISRLEPEDFAVYYCQQYADSPITFGQGTRLEIK

SEQ ID NO: 6134 - protein, 6 aa, synthetic construct
  REGION 1..6: note = fresolimumab light chain CDR1
QSLGSS

SEQ ID NO: 6135 - skipped

SEQ ID NO: 6136 - protein, 9 aa, synthetic construct
  REGION 1..9: note = fresolimumab light chain CDR3
QQYADSPIT

SEQ ID NO: 6137 - protein, 123 aa, synthetic construct
  REGION 1..123: note = fulranumab heavy chain V region
EVQLVESGGGLVQPGGSLRLSCAASGFTLRSYSMNWVRQAPGKGLEWVSYISRSSHTIFYADSVKGRFTISRDNAKNSLYLQMDSLRDEDTAMYYCARVYSSGWHVSDYFDYWGQGILVTVSS

SEQ ID NO: 6138 - protein, 8 aa, synthetic construct
  REGION 1..8: note = fulranumab heavy chain CDR1
GFTLRSYS

SEQ ID NO: 6139 - protein, 8 aa, synthetic construct
  REGION 1..8: note = fulranumab heavy chain CDR2
ISRSSHTI

SEQ ID NO: 6140 - protein, 16 aa, synthetic construct
  REGION 1..16: note = fulranumab heavy chain CDR3
ARVYSSGWHVSDYFDY

SEQ ID NO: 6141 - protein, 107 aa, synthetic construct [sequence omitted]

SEQ ID NO: 6142 - protein, 6 aa, synthetic construct
  REGION 1..6: note = fulranumab light chain CDR1
QGISSA

SEQ ID NO: 6143 - skipped

SEQ ID NO: 6144 - protein, 9 aa, synthetic construct
  REGION 1..9: note = fulranumab light chain CDR3
QQFNSYPLT

SEQ ID NO: 6145 - protein, 119 aa, synthetic construct
  REGION 1..119: note = galcanezumab heavy chain V region
QVQLVQSGAEVKKPGSSVKVSCKASGYTFGNYWMQWVRQAPGQGLEWMGAIYEGTGKTVYIQKFADRVTITADKSTSTAYMELSSLRSEDTAVYYCARLSDYVSGFGYWGQGTTVTVSS

SEQ ID NO: 6146 - protein, 8 aa, synthetic construct
  REGION 1..8: note = galcanezumab heavy chain CDR1
GYTFGNYW

SEQ ID NO: 6147 - protein, 8 aa, synthetic construct
  REGION 1..8: note = galcanezumab heavy chain CDR2
IYEGTGKT

SEQ ID NO: 6148 - protein, 12 aa, synthetic construct
  REGION 1..12: note = galcanezumab heavy chain CDR3
ARLSDYVSGFGY

SEQ ID NO: 6149 - protein, 107 aa, synthetic construct
  REGION 1..107: note = galcanezumab light chain V region
DIQMTQSPSSLSASVGDRVTITCRASKDISKYLNWYQQKPGKAPKLLIYYTSGYHSGVPSRFSGSGSGTDFTLTISSLQPEDFATYYCQQGDALPPTFGGGTKVEIK

SEQ ID NO: 6150 - protein, 6 aa, synthetic construct
  REGION 1..6: note = galcanezumab light chain CDR1
KDISKY

SEQ ID NO: 6151 - skipped

SEQ ID NO: 6152 - protein, 9 aa, synthetic construct
  REGION 1..9: note = galcanezumab light chain CDR3
QQGDALPPT

SEQ ID NO: 6153 - protein, 119 aa, synthetic construct [sequence omitted]

SEQ ID NO: 6154 - protein, 9 aa, synthetic construct
  REGION 1..9: note = ganitumab heavy chain CDR1
GGSISSSNW

SEQ ID NO: 6155 - protein, 7 aa, synthetic construct
  REGION 1..7: note = ganitumab heavy chain CDR2
IYHSGST

SEQ ID NO: 6156 - protein, 12 aa, synthetic construct
  REGION 1..12: note = ganitumab heavy chain CDR3
ARWTGRTDAFDI

SEQ ID NO: 6157 - protein, 112 aa, synthetic construct [sequence omitted]

SEQ ID NO: 6158 - protein, 11 aa, synthetic construct
  REGION 1..11: note = ganitumab light chain CDR1
QSLLHSNGYNY

SEQ ID NO: 6159 - skipped

SEQ ID NO: 6160 - protein, 9 aa, synthetic construct
  REGION 1..9: note = ganitumab light chain CDR3
MQGTHWPLT

SEQ ID NO: 6161 - protein, 126 aa, synthetic construct [sequence omitted]

SEQ ID NO: 6162 - protein, 7 aa, synthetic construct
  REGION 1..7: note = gantenerumab heavy chain CDR1
GFTFSSY

SEQ ID NO: 6163 - protein, 8 aa, synthetic construct
  REGION 1..8: note = gantenerumab heavy chain CDR2
INASGTRT

SEQ ID NO: 6164 - protein, 19 aa, synthetic construct
  REGION 1..19: note = gantenerumab heavy chain CDR3
ARGKGNTHKPYGYVRYFDV

SEQ ID NO: 6165 - protein, 108 aa, synthetic construct [sequence omitted]

SEQ ID NO: 6166 - protein, 7 aa, synthetic construct
  REGION 1..7: note = gantenerumab light chain CDR1
QSVSSSY

SEQ ID NO: 6167 - skipped

SEQ ID NO: 6168 - protein, 9 aa, synthetic construct
  REGION 1..9: note = gantenerumab light chain CDR3
LQIYNMPIT

SEQ ID NO: 6169 - protein, 117 aa, synthetic construct
  REGION 1..117: note = garivulimab heavy chain V region
EVQLVESGGGLVQPGGSLRLSCAVSGFSLTSYGVHWVRQAPGKGLEWVAVIWAGGSTNYADSVKGRFTISKDTSKNTVYLQMNSLRAEDTAVYYCAKPYGTSAMDYWGQGTLVTVSS

SEQ ID NO: 6170 - protein, 8 aa, synthetic construct
  REGION 1..8: note = garivulimab heavy chain CDR1
GFSLTSYG

SEQ ID NO: 6171 - protein, 7 aa, synthetic construct
  REGION 1..7: note = garivulimab heavy chain CDR2
IWAGGST

SEQ ID NO: 6172 - protein, 11 aa, synthetic construct
  REGION 1..11: note = garivulimab heavy chain CDR3
AKPYGTSAMDY

SEQ ID NO: 6173 - protein, 108 aa, synthetic construct
  REGION 1..108: note = garivulimab light chain V region
DIQMTQSPSSLSASVGDRVTITCKASQDVGIVVAWYQQKPGKAPKLLIYWASIRHTGVPSRFSGSGSGTEFTLTISSLQPDDFATYYCQQYSNYPLYTFGQGTKVEIK

SEQ ID NO: 6174 - protein, 6 aa, synthetic construct
  REGION 1..6: note = garivulimab light chain CDR1
QDVGIV

SEQ ID NO: 6175 - skipped

SEQ ID NO: 6176 - protein, 10 aa, synthetic construct
  REGION 1..10: note = garivulimab light chain CDR3
QQYSNYPLYT

SEQ ID NO: 6177 - protein, 125 aa, synthetic construct
  REGION 1..125: note = gedivumab heavy chain V region
EVQLVESGGGVVQPGKSLRLSCAASGLTFSSYAVHWVRQAPGKGLEWVTLISYDGANQYYADSVKGRFTISRDNSKNTVYLQMNSLRPEDTAVYYCAVPGPVFGIFPPWSYFDNWGQGILVTVSS

SEQ ID NO: 6178 - protein, 7 aa, synthetic construct
  REGION 1..7: note = gedivumab heavy chain CDR1
GLTFSSY

SEQ ID NO: 6179 - protein, 8 aa, synthetic construct
  REGION 1..8: note = gedivumab heavy chain CDR2
ISYDGANQ

SEQ ID NO: 6180 - protein, 18 aa, synthetic construct
  REGION 1..18: note = gedivumab heavy chain CDR3
AVPGPVFGIFPPWSYFDN

SEQ ID NO: 6181 - protein, 109 aa, synthetic construct
  REGION 1..109: note = gedivumab light chain V region
EIVLTQSPATLSVSPGERATLSCRASQVISHNLAWYQQKPGQAPRLLIYGASTRASGIPARFSGSGSGTDYTLTITSLQSEDFAVYYCQHYSNWPPRLTFGGGTKVEIK

SEQ ID NO: 6182 - protein, 6 aa, synthetic construct
  REGION 1..6: note = gedivumab light chain CDR1
QVISHN

SEQ ID NO: 6183 - skipped

SEQ ID NO: 6184 - protein, 11 aa, synthetic construct
  REGION 1..11: note = gedivumab light chain CDR3
QHYSNWPPRLT

SEQ ID NO: 6185 - protein, 116 aa, synthetic construct [sequence omitted]

SEQ ID NO: 6186 - protein, 8 aa, synthetic construct
  REGION 1..8: note = gemtuzumab ozogamicin heavy chain CDR1
GYTITDSN

SEQ ID NO: 6187 - protein, 8 aa, synthetic construct
  REGION 1..8: note = gemtuzumab ozogamicin heavy chain CDR2
IYPYNGGT

SEQ ID NO: 6188 - protein, 9 aa, synthetic construct
  REGION 1..9: note = gemtuzumab ozogamicin heavy chain CDR3
VNGNPWLAY

SEQ ID NO: 6189 - protein, 111 aa, synthetic construct [sequence omitted]

SEQ ID NO: 6190 - protein, 10 aa, synthetic construct
  REGION 1..10: note = gemtuzumab ozogamicin light chain CDR1
ESLDNYGIRF

SEQ ID NO: 6191 - skipped

SEQ ID NO: 6192 - protein, 9 aa, synthetic construct
  REGION 1..9: note = gemtuzumab ozogamicin light chain CDR3
QQTKEVPWS

SEQ ID NO: 6193 - protein, 120 aa, synthetic construct [sequence omitted]

SEQ ID NO: 6194 - protein, 10 aa, synthetic construct
  REGION 1..10: note = gevokizumab heavy chain CDR1
GFSLSTSGMG

SEQ ID NO: 6195 - protein, 7 aa, synthetic construct
  REGION 1..7: note = gevokizumab heavy chain CDR2
IWWDGDE

SEQ ID NO: 6196 - protein, 12 aa, synthetic construct
  REGION 1..12: note = gevokizumab heavy chain CDR3
ARNRYDPPWFVD

SEQ ID NO: 6197 - protein, 107 aa, synthetic construct [sequence omitted]

SEQ ID NO: 6198 - protein, 6 aa, synthetic construct
  REGION 1..6: note = gevokizumab light chain CDR1
QDISNY

SEQ ID NO: 6199 - skipped

SEQ ID NO: 6200 - protein, 9 aa, synthetic construct
  REGION 1..9: note = gevokizumab light chain CDR3
LQGKMLPWT

SEQ ID NO: 6201 - protein, 121 aa, synthetic construct
  REGION 1..121: note = gimsilumab heavy chain V region
EVQLVESGGGLVQPGGSLRLSCAASGFTFSRHWMHWLRQVPGKGPVWVSRINGAGTSITYADSVRGRFTISRDNANNTLFLQMNSLRADDTALYFCARANSVWFRGLFDYWGQGTPVTVSS

SEQ ID NO: 6202 - protein, 8 aa, synthetic construct
  REGION 1..8: note = gimsilumab heavy chain CDR1
GFTFSRHW

SEQ ID NO: 6203 - protein, 8 aa, synthetic construct
  REGION 1..8: note = gimsilumab heavy chain CDR2
INGAGTSI

SEQ ID NO: 6204 - protein, 14 aa, synthetic construct
  REGION 1..14: note = gimsilumab heavy chain CDR3
ARANSVWFRGLFDY

SEQ ID NO: 6205 - protein, 107 aa, synthetic construct
  REGION 1..107: note = gimsilumab light chain V region
EIVLTQSPVTLSVSPGERVTLSCRASQSVSTNLAWYQQKLGQGPRLLIYGASTRATDIPARFSGSGSETEFTLTISSLQSEDFAVYYCQQYDKWPDTFGQGTKLEIK

SEQ ID NO: 6206 - protein, 6 aa, synthetic construct
  REGION 1..6: note = gimsilumab light chain CDR1
QSVSTN

SEQ ID NO: 6207 - skipped

SEQ ID NO: 6208 - protein, 9 aa, synthetic construct
  REGION 1..9: note = gimsilumab light chain CDR3
QQYDKWPDT

SEQ ID NO: 6209 - protein, 124 aa, synthetic construct
  REGION 1..124: note = ginisortamab heavy chain V region
QVQLVESGAEVKKPGATVKISCKVSGYTFTDYYMHWVQQAPGKGLEWMGLVDPEDGETIYAEKFQGRVTITADTSTDTAYMELSSLRSEDTAVYYCATDARGSGSYYPNHFDYWGQGTLVTVSS

SEQ ID NO: 6210 - protein, 8 aa, synthetic construct
  REGION 1..8: note = ginisortamab heavy chain CDR1
GYTFTDYY

SEQ ID NO: 6211 - protein, 8 aa, synthetic construct
  REGION 1..8: note = ginisortamab heavy chain CDR2
VDPEDGET

SEQ ID NO: 6212 - protein, 14 aa, synthetic construct
  REGION 1..14: note = ginisortamab heavy chain CDR3
ARGSGSYYPNHFDY

SEQ ID NO: 6213 - protein, 112 aa, synthetic construct
  REGION 1..112: note = ginisortamab light chain V region
DIVMTQSPDSLAVSLGERATINCKSSQSVLYSSNNKNYLAWYQQKPGQPPKLLIYWASTRESGVPDRFSGSGSGTDFTLTINSLQAEDVAVYFCQQYYDTPTFGQGTRLEIK

SEQ ID NO: 6214 - protein, 12 aa, synthetic construct
  REGION 1..12: note = ginisortamab light chain CDR1
QSVLYSSNNKNY

SEQ ID NO: 6215 - skipped

SEQ ID NO: 6216 - protein, 8 aa, synthetic construct
  REGION 1..8: note = ginisortamab light chain CDR3
QQYYDTPT

SEQ ID NO: 6217 - protein, 119 aa, synthetic construct [sequence omitted]

SEQ ID NO: 6218 - protein, 10 aa, synthetic construct
  REGION 1..10: note = glembatumumab heavy chain CDR1
GGSISSFNYY

SEQ ID NO: 6219 - protein, 10 aa, synthetic construct
  REGION 1..10: note = glembatumumab heavy chain CDR2
IGYIYYSGST

SEQ ID NO: 6220 - protein, 11 aa, synthetic construct
  REGION 1..11: note = glembatumumab heavy chain CDR3
ARGYNWNYFDY

SEQ ID NO: 6221 - protein, 108 aa, synthetic construct [sequence omitted]

SEQ ID NO: 6222 - protein, 7 aa, synthetic construct
  REGION 1..7: note = glembatumumab light chain CDR1
QSVDNNL

SEQ ID NO: 6223 - skipped

SEQ ID NO: 6224 - protein, 10 aa, synthetic construct [sequence omitted]

SEQ ID NO: 6225 - protein, 119 aa, synthetic construct [sequence omitted]

SEQ ID NO: 6226 - protein, 10 aa, synthetic construct
  REGION 1..10: note = glembatumumab vedotin heavy chain CDR1
GGSISSFNYY

SEQ ID NO: 6227 - protein, 10 aa, synthetic construct
  REGION 1..10: note = glembatumumab vedotin heavy chain CDR2
IGYIYYSGST

SEQ ID NO: 6228 - protein, 11 aa, synthetic construct
  REGION 1..11: note = glembatumumab vedotin heavy chain CDR3
ARGYNWNYFDY

SEQ ID NO: 6229 - protein, 108 aa, synthetic construct [sequence omitted]

SEQ ID NO: 6230 - protein, 7 aa, synthetic construct
  REGION 1..7: note = glembatumumab vedotin light chain CDR1
QSVDNNL

SEQ ID NO: 6231 - skipped

SEQ ID NO: 6232 - protein, 10 aa, synthetic construct [sequence omitted]

SEQ ID NO: 6233 - protein, 117 aa, synthetic construct
  REGION 1..117: note = gosuranemab heavy chain V region
EVHLVESGGALVKPGGSLRLSCAASGFSFSKYGMSWVRQAPGKGLEWVATISSSGSRTYYPDSVKGRFTISRDNAKNTLYLQMNSLRAEDTAMYYCSISWDGAMDYWGQGTTVTVSS

SEQ ID NO: 6234 - protein, 8 aa, synthetic construct
  REGION 1..8: note = gosuranemab heavy chain CDR1
GFSFSKYG

SEQ ID NO: 6235 - protein, 8 aa, synthetic construct
  REGION 1..8: note = gosuranemab heavy chain CDR2
ISSSGSRT

SEQ ID NO: 6236 - protein, 10 aa, synthetic construct
  REGION 1..10: note = gosuranemab heavy chain CDR3
SISWDGAMDY

SEQ ID NO: 6237 - protein, 112 aa, synthetic construct
  REGION 1..112: note = gosuranemab light chain V region
DVVMTQSPLSLPVTLGQPASISCKSSQSIVHSNGNTYLEWYLQKPGQSPQLLVYKVSNRFSGVPDRFSGSGSGTDFTLKISRVEAEDVGTYYCFQGSLVPWAFGGGTKVEIK

SEQ ID NO: 6238 - protein, 11 aa, synthetic construct
  REGION 1..11: note = gosuranemab light chain CDR1
QSIVHSNGNTY

SEQ ID NO: 6239 - skipped

SEQ ID NO: 6240 - protein, 9 aa, synthetic construct
  REGION 1..9: note = gosuranemab light chain CDR3
FQGSLVPWA

SEQ ID NO: 6241 - protein, 124 aa, synthetic construct
  REGION 1..124: note = gremubamab heavy chain V region
EVQLLESGGGLVQPGGSLRLSCAASGFTFSSYAMNWVRQAPGKGLEWVSAITMSGITAYYTDDVKGRFTISRDNSKNTLYLQMNSLRAEDTAVYYCAKEEFLPGTHYYYGMDVWGQGTTVTVSS

SEQ ID NO: 6242 - protein, 7 aa, synthetic construct
  REGION 1..7: note = gremubamab heavy chain CDR1
GFTFSSY

SEQ ID NO: 6243 - protein, 8 aa, synthetic construct
  REGION 1..8: note = gremubamab heavy chain CDR2
ITMSGITA

SEQ ID NO: 6244 - protein, 17 aa, synthetic construct
  REGION 1..17: note = gremubamab heavy chain CDR3
AKEEFLPGTHYYYGMDV

SEQ ID NO: 6245 - protein, 107 aa, synthetic construct
  REGION 1..107: note = gremubamab light chain V region
AIQMTQSPSSLSASVGDRVTITCRASQGIRNDLGWYQQKPGKAPKLLIYSASTLQSGVPSRFSGSGSGTDFTLTISSLQPEDFATYYCLQDYNYPWTFGQGTKVEIK

SEQ ID NO: 6246 - protein, 6 aa, synthetic construct
  REGION 1..6: note = gremubamab light chain CDR1
QGIRND

SEQ ID NO: 6247 - skipped

SEQ ID NO: 6248 - protein, 9 aa, synthetic construct
  REGION 1..9: note = gremubamab light chain CDR3
LQDYNYPWT

SEQ ID NO: 6249 - protein, 125 aa, synthetic construct
  REGION 1..125: note = gresonitamab heavy chain 1 V region
QVQLVQSGAEVKKPGASVKVSCKASGYTFTGYYMHWVRQAPGQCLEWMGWINPNSGGTKYAQKFQGRVTMTRDTSISTAYMELSRLRSDDTAVYYCARDRITVAGTYYYYGMDVWGQGTTVTVSS

SEQ ID NO: 6250 - protein, 8 aa, synthetic construct
  REGION 1..8: note = gresonitamab heavy chain 1 CDR1
GYTFTGYY

SEQ ID NO: 6251 - protein, 9 aa, synthetic construct
  REGION 1..9: note = gresonitamab heavy chain 1 CDR2
INPNSGGTK

SEQ ID NO: 6252 - protein, 18 aa, synthetic construct
  REGION 1..18: note = gresonitamab heavy chain 1 CDR3
ARDRITVAGTYYYYGMDV

SEQ ID NO: 6253 - protein, 107 aa, synthetic construct
  REGION 1..107: note = gresonitamab light chain 1 V region
DIQMTQSPSSVSASVGDRVTITCRASQGVNNWLAWYQQKPGKAPKLLIYTASSLQSGVPSRFSGSGSGTDFTLTIRSLQPEDFATYYCQQANSFPITFGCGTRLEIK

SEQ ID NO: 6254 - protein, 6 aa, synthetic construct
  REGION 1..6: note = gresonitamab light chain 1 CDR1
QGVNNW

SEQ ID NO: 6255 - skipped

SEQ ID NO: 6256 - protein, 9 aa, synthetic construct
  REGION 1..9: note = gresonitamab light chain 1 CDR3
QQANSFPIT

SEQ ID NO: 6257 - protein, 125 aa, synthetic construct
  REGION 1..125: note = gresonitamab heavy chain 2 V region
EVQLVESGGGLVQPGGSLKLSCAASGFTFNKYAMNWVRQAPGKGLEWVARIRSKYNNYATYYADSVKDRFTISRDDSKNTAYLQMNNLKTEDTAVYYCVRHGNFGNSYISYWAYWGQGTLVTVSS

SEQ ID NO: 6258 - protein, 8 aa, synthetic construct
  REGION 1..8: note = gresonitamab heavy chain 2 CDR1
GFTFNKYA

SEQ ID NO: 6259 - protein, 10 aa, synthetic construct
  REGION 1..10: note = gresonitamab heavy chain 2 CDR2
IRSKYNNYAT

SEQ ID NO: 6260 - protein, 16 aa, synthetic construct
  REGION 1..16: note = gresonitamab heavy chain 2 CDR3
VRHGNFGNSYISYWAY

SEQ ID NO: 6261 - protein, 109 aa, synthetic construct
  REGION 1..109: note = gresonitamab light chain 2 V region
QTVVTQEPSLTVSPGGTVTLTCGSSTGAVTSGNYPNWVQQKPGQAPRGLIGGTKFLAPGTPARFSGSLLGGKAALTLSGVQPEDEAEYYCVLWYSNRWVFGGGTKLTVL

SEQ ID NO: 6262 - protein, 9 aa, synthetic construct
  REGION 1..9: note = gresonitamab light chain 2 CDR1
TGAVTSGNY

SEQ ID NO: 6263 - skipped

SEQ ID NO: 6264 - protein, 9 aa, synthetic construct
  REGION 1..9: note = gresonitamab light chain 2 CDR3
VLWYSNRWV

SEQ ID NO: 6265 - protein, 117 aa, synthetic construct
  REGION 1..117: note = guselkumab heavy chain V region
EVQLVQSGAEVKKPGESLKISCKGSGYSFSNYWIGWVRQMPGKGLEWMGIIDPSNSYTRYSPSFQGQVTISADKSISTAYLQWSSLKASDTAMYYCARWYYKPFDVWGQGTLVTVSS

SEQ ID NO: 6266 - protein, 7 aa, synthetic construct
  REGION 1..7: note = guselkumab heavy chain CDR1
GYSFSNY

SEQ ID NO: 6267 - protein, 8 aa, synthetic construct
  REGION 1..8: note = guselkumab heavy chain CDR2
IDPSNSYT

SEQ ID NO: 6268 - protein, 10 aa, synthetic construct
  REGION 1..10: note = guselkumab heavy chain CDR3
ARWYYKPFDV

SEQ ID NO: 6269 - protein, 111 aa, synthetic construct
  REGION 1..111: note = guselkumab light chain V region
QSVLTQPPSVSGAPGQRVTISCTGSSSNIGSGYDVHWYQQLPGTAPKLLIYGNSKRPSGVPDRFSGSKSGTSASLAITGLQSEDEADYYCASWTDGLSLVVFGGGTKLTVL

SEQ ID NO: 6270 - protein, 9 aa, synthetic construct
  REGION 1..9: note = guselkumab light chain CDR1
SSNIGSGYD

SEQ ID NO: 6271 - skipped

SEQ ID NO: 6272 - protein, 11 aa, synthetic construct
  REGION 1..11: note = guselkumab light chain CDR3
ASWTDGLSLVV

SEQ ID NO: 6273 - protein, 124 aa, synthetic construct
  REGION 1..124: note = ianalumab heavy chain V region
QVQLQQSGPGLVKPSQTLSLTCAISGDSVSSNSAAWGWIRQSPGRGLEWLGRIYYRSKWYNSYAVSVKSRITINPDTSKNQFSLQLNSVTPEDTAVYYCARYQWVPKIGVFDSWGQGTLVTVSS

SEQ ID NO: 6274 - protein, 10 aa, synthetic construct
  REGION 1..10: note = ianalumab heavy chain CDR1
GDSVSSNSAA

SEQ ID NO: 6275 - protein, 10 aa, synthetic construct
  REGION 1..10: note = ianalumab heavy chain CDR2
IYYRSKWYNS

SEQ ID NO: 6276 - protein, 14 aa, synthetic construct
  REGION 1..14: note = ianalumab heavy chain CDR3
ARYQWVPKIGVFDS

SEQ ID NO: 6277 - protein, 108 aa, synthetic construct
  REGION 1..108: note = ianalumab light chain V region
DIVLTQSPATLSLSPGERATLSCRASQFILPEYLSWYQQKPGQAPRLLIYGSSSRATGVPARFSGSGSGTDFTLTISSLEPEDFAVYYCQQFYSSPLTFGQGTKVEIK

SEQ ID NO: 6278 - protein, 7 aa, synthetic construct
  REGION 1..7: note = ianalumab light chain CDR1
QFILPEY

SEQ ID NO: 6279 - skipped

SEQ ID NO: 6280 - protein, 9 aa, synthetic construct
  REGION 1..9: note = ianalumab light chain CDR3
QQFYSSPLT

SEQ ID NO: 6281 - protein, 116 aa, synthetic construct [sequence omitted]

SEQ ID NO: 6282 - protein, 8 aa, synthetic construct
  REGION 1..8: note = ibalizumab heavy chain CDR1
GYTITDSN

SEQ ID NO: 6283 - protein, 8 aa, synthetic construct
  REGION 1..8: note = ibalizumab heavy chain CDR2
IYPYNGGT

SEQ ID NO: 6284 - protein, 9 aa, synthetic construct
  REGION 1..9: note = ibalizumab heavy chain CDR3
VNGNPWLAY

SEQ ID NO: 6285 - protein, 111 aa, synthetic construct [sequence omitted]

SEQ ID NO: 6286 - protein, 10 aa, synthetic construct
  REGION 1..10: note = ibalizumab light chain CDR1
ESLDNYGIRF

SEQ ID NO: 6287 - skipped

SEQ ID NO: 6288 - protein, 8 aa, synthetic construct
  REGION 1..8: note = ibalizumab light chain CDR3
QQTKEVPW

SEQ ID NO: 6289 - protein, 122 aa, synthetic construct
  REGION 1..122: note = ibritumomab tiuxetan heavy chain V region
QVQLQQSGPEVVKPGASVKMSCKASGYTFTSYVIHWVRQKPGQGLDWIGYINPYNDGTDYDEKFKGKATLTSDTSTSTAYMELSSLRSEDTAVYYCAREKDNYATGAWFAYWGQGTLVTVSS

SEQ ID NO: 6290 - protein, 8 aa, synthetic construct
  REGION 1..8: note = ibritumomab tiuxetan heavy chain CDR1
GYTFTSYV

SEQ ID NO: 6291 - protein, 8 aa, synthetic construct
  REGION 1..8: note = ibritumomab tiuxetan heavy chain CDR2
INPYNDGT

SEQ ID NO: 6292 - protein, 15 aa, synthetic construct
  REGION 1..15: note = ibritumomab tiuxetan heavy chain CDR3
AREKDNYATGAWFAY

SEQ ID NO: 6293 - protein, 112 aa, synthetic construct
  REGION 1..112: note = ibritumomab tiuxetan light chain V region
DIVMTQSPDSLAVSLGERVTMNCKSSQSLLYSTNQKNYLAWYQQKPGQSPKLLIYWASTRESGVPDRFSGSGSGTDFTLTISSVQAEDVAVYYCQQYYSYRTFGGGTKLEIK

SEQ ID NO: 6294 - protein, 12 aa, synthetic construct
  REGION 1..12: note = ibritumomab tiuxetan light chain CDR1
QSLLYSTNQKNY

SEQ ID NO: 6295 - skipped

SEQ ID NO: 6296 - protein, 8 aa, synthetic construct
  REGION 1..8: note = ibritumomab tiuxetan light chain CDR3
QQYYSYRT

SEQ ID NO: 6297 - protein, 126 aa, synthetic construct
  REGION 1..126: note = icrucumab heavy chain V region
QAQVVESGGGVVQSGRSLRLSCAASGFAFSSYGMHWVRQAPGKGLEWVAVIWYDGSNKYYADSVRGRFTISRDNSENTLYLQMNSLRAEDTAVYYCARDHYGSGVHHYFYYGLDVWGQGTTVTVSS

SEQ ID NO: 6298 - protein, 7 aa, synthetic construct
  REGION 1..7: note = icrucumab heavy chain CDR1
GFAFSSY

SEQ ID NO: 6299 - protein, 8 aa, synthetic construct
  REGION 1..8: note = icrucumab heavy chain CDR2
IWYDGSNK

SEQ ID NO: 6300 - protein, 19 aa, synthetic construct
  REGION 1..19: note = icrucumab heavy chain CDR3
ARDHYGSGVHHYFYYGLDV

SEQ ID NO: 6301 - protein, 108 aa, synthetic construct
  REGION 1..108: note = icrucumab light chain V region
EIVLTQSPGTLSLSPGERATLSCRASQSVSSSYLAWYQQKPGQAPRLLIYGASSRATGIPDRFSGSGSGTDFTLTISRLEPEDFAVYYCQQYGSSPLTFGGGTKVEIK

SEQ ID NO: 6302 - protein, 7 aa, synthetic construct
  REGION 1..7: note = icrucumab light chain CDR1
QSVSSSY

SEQ ID NO: 6303 - skipped

SEQ ID NO: 6304 - protein, 9 aa, synthetic construct
  REGION 1..9: note = icrucumab light chain CDR3
QQYGSSPLT

SEQ ID NO: 6305 - protein, 121 aa, synthetic construct
  REGION 1..121: note = idactamab heavy chain V region
QVQLQQWGAGLLKPSETLSLTCAVYGGSFSGYYWSWIRQPPGKGLEWIGEIHHSGGANYNPSLKSRVTISVDTSKNQFSLKLSSVTAADTAVYYCARGQGKNWHYDYFDYWGQGTLVTVSS

SEQ ID NO: 6306 - protein, 8 aa, synthetic construct
  REGION 1..8: note = idactamab heavy chain CDR1
GGSFSGYY

SEQ ID NO: 6307 - protein, 7 aa, synthetic construct
  REGION 1..7: note = idactamab heavy chain CDR2
IHHSGGA

SEQ ID NO: 6308 - protein, 15 aa, synthetic construct
  REGION 1..15: note = idactamab heavy chain CDR3
ARGQGKNWHYDYFDY

SEQ ID NO: 6309 - protein, 107 aa, synthetic construct
  REGION 1..107: note = idactamab light chain V region
DIQMTQSPSTLSASVGDRVTITCRASQSIRSWLAWYQQKPGKAPKLLIYKASILKIGVPSRFSGSGSGTEFTLTISSLQPDDFATYYCQQYYSYSRTFGQGTKVEIK

SEQ ID NO: 6310 - protein, 6 aa, synthetic construct
  REGION 1..6: note = idactamab light chain CDR1
QSIRSW

SEQ ID NO: 6311 - skipped

SEQ ID NO: 6312 - protein, 10 aa, synthetic construct
  REGION 1..10: note = idactamab light chain CDR3
QQYYSYSRTF

SEQ ID NO: 6313 - protein, 118 aa, synthetic construct
  REGION 1..118: note = ifabotuzumab heavy chain V region
QVQLVQSGAEVKKPGASVKVSCKASGYTFTGYWMNWVRQAPGQGLEWMGDIYPGSGNTNYDEKFQGRVTMTRDTSISTAYMELSRLRSDDTAVYYCARGGYYEDFDSWGQGTTVTVSS

SEQ ID NO: 6314 - protein, 8 aa, synthetic construct
  REGION 1..8: note = ifabotuzumab heavy chain CDR1
GYTFTGYW

SEQ ID NO: 6315 - protein, 8 aa, synthetic construct
  REGION 1..8: note = ifabotuzumab heavy chain CDR2
IYPGSGNT

SEQ ID NO: 6316 - protein, 11 aa, synthetic construct
  REGION 1..11: note = ifabotuzumab heavy chain CDR3
ARGGYYEDFDS

SEQ ID NO: 6317 - protein, 107 aa, synthetic construct
  REGION 1..107: note = ifabotuzumab light chain V region
DIQMTQSPSFLSASVGDRVTITCRASQGIISYLAWYQQKPEKAPKRLIYAASSLQSGVPSRFSGSGSGTEFTLTISSLQPEDFATYYCGQYANYPYTFGQGTKLEIK

SEQ ID NO: 6318 - protein, 6 aa, synthetic construct
  REGION 1..6: note = ifabotuzumab light chain CDR1
QGIISY

SEQ ID NO: 6319 - skipped

SEQ ID NO: 6320 - protein, 9 aa, synthetic construct
  REGION 1..9: note = ifabotuzumab light chain CDR3
GQYANYPYT

SEQ ID NO: 6321 - protein, 118 aa, synthetic construct
  REGION 1..118: note = imalumab heavy chain V region
EVQLLESGGGLVQPGGSLRLSCAASGFTFSIYSMNWVRQAPGKGLEWVSSIGSSGGTTYYADSVKGRFTISRDNSKNTLYLQMNSLRAEDTAVYYCAGSQWLYGMDVWGQGTTVTVSS

SEQ ID NO: 6322 - protein, 8 aa, synthetic construct
  REGION 1..8: note = imalumab heavy chain CDR1
GFTFSIYS

SEQ ID NO: 6323 - protein, 8 aa, synthetic construct
  REGION 1..8: note = imalumab heavy chain CDR2
IGSSGGTT

SEQ ID NO: 6324 - protein, 11 aa, synthetic construct
  REGION 1..11: note = imalumab heavy chain CDR3
AGSQWLYGMDV

SEQ ID NO: 6325 - protein, 107 aa, synthetic construct
  REGION 1..107: note = imalumab light chain V region
DIQMTQSPSSLSASVGDRVTITCRSSQRIMTYLNWYQQKPGKAPKLLIFVASHSQSGVPSRFRGSGSETDFTLTISGLQPEDSATYYCQQSFWTPLTFGGGTKVEIK

SEQ ID NO: 6326 - protein, 6 aa, synthetic construct
  REGION 1..6: note = imalumab light chain CDR1
QRIMTY

SEQ ID NO: 6327 - skipped

SEQ ID NO: 6328 - protein, 9 aa, synthetic construct
  REGION 1..9: note = imalumab light chain CDR3
QQSFWTPLT

SEQ ID NO: 6329 - protein, 120 aa, synthetic construct; identical to SEQ ID NO: 422
  REGION 1..120: note = imdevimab heavy chain V region

SEQ ID NO: 6330 - protein, 7 aa, synthetic construct
  REGION 1..7: note = imdevimab heavy chain CDR1
GFTFSNY

SEQ ID NO: 6331 - protein, 8 aa, synthetic construct
  REGION 1..8: note = imdevimab heavy chain CDR2
ISYDGSNK

SEQ ID NO: 6332 - protein, 12 aa, synthetic construct
  REGION 1..12: note = imdevimab heavy chain CDR3
SGSDYGDYLLVY

SEQ ID NO: 6333 - protein, 110 aa, synthetic construct; identical to SEQ ID NO: 421
  REGION 1..110: note = imdevimab light chain V region

SEQ ID NO: 6334 - protein, 9 aa, synthetic construct
  REGION 1..9: note = imdevimab light chain CDR1
SSDVGGYNY

SEQ ID NO: 6335 - skipped

SEQ ID NO: 6336 - protein, 10 aa, synthetic construct
  REGION 1..10: note = imdevimab light chain CDR3
NSLTSISTWV

SEQ ID NO: 6337 - protein, 124 aa, synthetic construct
  REGION 1..124: note = inclacumab heavy chain V region
EVQLVESGGGLVRPGGSLRLSCAASGFTFSNYDMHWVRQATGKGLEWVSAITAAGDIYYPGSVKGRFTISRENAKNSLYLQMNSLRAGDTAVYYCARGRYSGSGSYYNDWFDPWGQGTLVTVSS

SEQ ID NO: 6338 - protein, 7 aa, synthetic construct
  REGION 1..7: note = inclacumab heavy chain CDR1
GFTFSNY

SEQ ID NO: 6339 - protein, 7 aa, synthetic construct
  REGION 1..7: note = inclacumab heavy chain CDR2
ITAAGDI

SEQ ID NO: 6340 - protein, 18 aa, synthetic construct
  REGION 1..18: note = inclacumab heavy chain CDR3
ARGRYSGSGSYYNDWFDP

SEQ ID NO: 6341 - protein, 107 aa, synthetic construct
  REGION 1..107: note = inclacumab light chain V region
EIVLTQSPATLSLSPGERATLSCRASQSVSSYLAWYQQKPGQAPRLLIYDASNRATGIPARFSGSGSGTDFTLTISSLEPEDFAVYYCQQRSNWPLTFGGGTKVEIK

SEQ ID NO: 6342 - protein, 6 aa, synthetic construct
  REGION 1..6: note = inclacumab light chain CDR1
QSVSSY

SEQ ID NO: 6343 - skipped

SEQ ID NO: 6344 - protein, 9 aa, synthetic construct
  REGION 1..9: note = inclacumab light chain CDR3
QQRSNWPLT

SEQ ID NO: 6345 - protein, 119 aa, synthetic construct
  REGION 1..119: note = indusatumab heavy chain V region
QVQLQQWGAGLLKPSETLSLTCAVFGGSFSGYYWSWIRQPPGKGLEWIGEINHRGNTNDNPSLKSRVTISVDTSKNQFALKLSSVTAADTAVYYCARERGYTYGNFDHWGQGTLVTVSS

SEQ ID NO: 6346 - protein, 8 aa, synthetic construct
  REGION 1..8: note = indusatumab heavy chain CDR1
GGSFSGYY

SEQ ID NO: 6347 - protein, 7 aa, synthetic construct
  REGION 1..7: note = indusatumab heavy chain CDR2
INHRGNT

SEQ ID NO: 6348 - protein, 13 aa, synthetic construct
  REGION 1..13: note = indusatumab heavy chain CDR3
ARERGYTYGNFDH

SEQ ID NO: 6349 - protein, 107 aa, synthetic construct
  REGION 1..107: note = indusatumab light chain V region
EIVMTQSPATLSVSPGERATLSCRASQSVSRNLAWYQQKPGQAPRLLIYGASTRATGIPARFSGSGSGTEFTLTIGSLQSEDFAVYYCQQYKTWPRTFGQGTNVEIK

SEQ ID NO: 6350 - protein, 6 aa, synthetic construct
  REGION 1..6: note = indusatumab light chain CDR1
QSVSRN

SEQ ID NO: 6351 - skipped

SEQ ID NO: 6352 - protein, 9 aa, synthetic construct
  REGION 1..9: note = indusatumab light chain CDR3
QQYKTWPRT

SEQ ID NO: 6353 - protein, 119 aa, synthetic construct; identical to SEQ ID NO: 6345
  REGION 1..119: note = indusatumab vedotin heavy chain V region

SEQ ID NO: 6354 - protein, 8 aa, synthetic construct
  REGION 1..8: note = indusatumab vedotin heavy chain CDR1
GGSFSGYY

SEQ ID NO: 6355 - protein, 7 aa, synthetic construct
  REGION 1..7: note = indusatumab vedotin heavy chain CDR2
INHRGNT

SEQ ID NO: 6356 - protein, 13 aa, synthetic construct
  REGION 1..13: note = indusatumab vedotin heavy chain CDR3
ARERGYTYGNFDH

SEQ ID NO: 6357 - protein, 107 aa, synthetic construct; identical to SEQ ID NO: 6349
  REGION 1..107: note = indusatumab vedotin light chain V region

SEQ ID NO: 6358 - protein, 6 aa, synthetic construct
  REGION 1..6: note = indusatumab vedotin light chain CDR1
QSVSRN

SEQ ID NO: 6359 - skipped

SEQ ID NO: 6360 - protein, 9 aa, synthetic construct
  REGION 1..9: note = indusatumab vedotin light chain CDR3
QQYKTWPRT

SEQ ID NO: 6361 - protein, 121 aa, synthetic construct
  REGION 1..121: note = inebilizumab heavy chain V region
EVQLVESGGGLVQPGGSLRLSCAASGFTFSSSWMNWVRQAPGKGLEWVGRIYPGDGDTNYNVKFKGRFTISRDDSKNSLYLQMNSLKTEDTAVYYCARSGFITTVRDFDYWGQGTLVTVSS

SEQ ID NO: 6362 - protein, 8 aa, synthetic construct
  REGION 1..8: note = inebilizumab heavy chain CDR1
GFTFSSSW

SEQ ID NO: 6363 - protein, 8 aa, synthetic construct
  REGION 1..8: note = inebilizumab heavy chain CDR2
IYPGDGDT

SEQ ID NO: 6364 - protein, 14 aa, synthetic construct
  REGION 1..14: note = inebilizumab heavy chain CDR3
ARSGFITTVRDFDY

SEQ ID NO: 6365 - protein, 111 aa, synthetic construct
  REGION 1..111: note = inebilizumab light chain V region
EIVLTQSPDFQSVTPKEKVTITCRASESVDTFGISFMNWFQQKPDQSPKLLIHEASNQGSGVPSRFSGSGSGTDFTLTINSLEAEDAATYYCQQSKEVPFTFGGGTKVEIK

SEQ ID NO: 6366 - protein, 10 aa, synthetic construct
  REGION 1..10: note = inebilizumab light chain CDR1
ESVDTFGISF

SEQ ID NO: 6367 - skipped

SEQ ID NO: 6368 - protein, 10 aa, synthetic construct
  REGION 1..10: note = inebilizumab light chain CDR3
QQSKEVPFTF

SEQ ID NO: 6369 - protein, 119 aa, synthetic construct
  REGION 1..119: note = infliximab heavy chain V region
EVKLEESGGGLVQPGGSMKLSCVASGFIFSNHWMNWVRQSPEKGLEWVAEIRSKSINSATHYAESVKGRFTISRDDSKSAVYLQMTDLRTEDTGVYYCSRNYYGSTYDYWGQGTTLTVS

SEQ ID NO: 6370 - protein, 7 aa, synthetic construct
  REGION 1..7: note = infliximab heavy chain CDR1
GFIFSNH

SEQ ID NO: 6371 - protein, 10 aa, synthetic construct
  REGION 1..10: note = infliximab heavy chain CDR2
IRSKSINSAT

SEQ ID NO: 6372 - protein, 11 aa, synthetic construct
  REGION 1..11: note = infliximab heavy chain CDR3
SRNYYGSTYDY

SEQ ID NO: 6373 - protein, 107 aa, synthetic construct
  REGION 1..107: note = infliximab light chain V region
DILLTQSPAILSVSPGERVSFSCRASQFVGSSIHWYQQRTNGSPRLLIKYASESMSGIPSRFSGSGSGTDFTLSINTVESEDIADYYCQQSHSWPFTFGSGTNLEVK

SEQ ID NO: 6374 - protein, 6 aa, synthetic construct
  REGION 1..6: note = infliximab light chain CDR1
QFVGSS

SEQ ID NO: 6375 - skipped

SEQ ID NO: 6376 - protein, 9 aa, synthetic construct
  REGION 1..9: note = infliximab light chain CDR3
QQSHSWPFT

SEQ ID NO: 6377 - protein, 119 aa, synthetic construct
  REGION 1..119: note = intetumumab heavy chain V region
QVQLVESGGGVVQPGRSRRLSCAASGFTFSRYTMHWVRQAPGKGLEWVAVISFDGSNKYYVDSVKGRFTISRDNSENTLYLQVNILRAEDTAVYYCAREARGSYAFDIWGQGTMVTVSS

SEQ ID NO: 6378 - protein, 8 aa, synthetic construct
  REGION 1..8: note = intetumumab heavy chain CDR1
GFTFSRYT

SEQ ID NO: 6379 - protein, 8 aa, synthetic construct
  REGION 1..8: note = intetumumab heavy chain CDR2
ISFDGSNK

SEQ ID NO: 6380 - protein, 12 aa, synthetic construct
  REGION 1..12: note = intetumumab heavy chain CDR3
AREARGSYAFDI

SEQ ID NO: 6381 - protein, 108 aa, synthetic construct
  REGION 1..108: note = intetumumab light chain V region
EIVLTQSPATLSLSPGERATLSCRASQSVSSYLAWYQQKPGQAPRLLIYDASNRATGIPARFSGSGSGTDFTLTISSLEPEDFAVYYCQQRSNWPPFTFGPGTKVDIK

SEQ ID NO: 6382 - protein, 6 aa, synthetic construct
  REGION 1..6: note = intetumumab light chain CDR1
QSVSSY

SEQ ID NO: 6383 - skipped

SEQ ID NO: 6384 - protein, 10 aa, synthetic construct
  REGION 1..10: note = intetumumab light chain CDR3
QQRSNWPPFT

SEQ ID NO: 6385 - protein, 118 aa, synthetic construct
  REGION 1..118: note = ipilimumab heavy chain V region
QVQLVESGGGVVQPGRSLRLSCAASGFTFSSYTMHWVRQAPGKGLEWVTFISYDGNNKYYADSVKGRFTISRDNSKNTLYLQMNSLRAEDTAIYYCARTGWLGPFDYWGQGTLVTVSS

SEQ ID NO: 6386 - protein, 7 aa, synthetic construct
  REGION 1..7: note = ipilimumab heavy chain CDR1
GFTFSSY

SEQ ID NO: 6387 - protein, 8 aa, synthetic construct
  REGION 1..8: note = ipilimumab heavy chain CDR2
ISYDGNNK

SEQ ID NO: 6388 - protein, 11 aa, synthetic construct
  REGION 1..11: note = ipilimumab heavy chain CDR3
ARTGWLGPFDY

SEQ ID NO: 6389 - protein, 108 aa, synthetic construct
  REGION 1..108: note = ipilimumab light chain V region
EIVLTQSPGTLSLSPGERATLSCRASQSVGSSYLAWYQQKPGQAPRLLIYGAFSRATGIPDRFSGSGSGTDFTLTISRLEPEDFAVYYCQQYGSSPWTFGQGTKVEIK

SEQ ID NO: 6390 - protein, 7 aa, synthetic construct
  REGION 1..7: note = ipilimumab light chain CDR1
QSVGSSY

SEQ ID NO: 6391 - skipped

SEQ ID NO: 6392 - protein, 9 aa, synthetic construct
  REGION 1..9: note = ipilimumab light chain CDR3
QQYGSSPWT

SEQ ID NO: 6393 - protein, 112 aa, synthetic construct
  REGION 1..112: note = iratumumab heavy chain V region
QVQLQQWGAGLLKPSETLSLTCAVYGGSFSAYYWSWIRQPPGKGLEWIGDINHGGGTNYNPSLKSRVTISVDTSKNQFSLKLNSVTAADTAVYYCASLTAYWGQGSLVTVSS

SEQ ID NO: 6394 - protein, 8 aa, synthetic construct
  REGION 1..8: note = iratumumab heavy chain CDR1
GGSFSAYY

SEQ ID NO: 6395 - protein, 10 aa, synthetic construct
  REGION 1..10: note = iratumumab heavy chain CDR2
IGDINHGGGT

SEQ ID NO: 6396 - protein, 6 aa, synthetic construct
  REGION 1..6: note = iratumumab heavy chain CDR3
ASLTAY

SEQ ID NO: 6397 - protein, 107 aa, synthetic construct
  REGION 1..107: note = iratumumab light chain V region
DIQMTQSPTSLSASVGDRVTITCRASQGISSWLTWYQQKPEKAPKSLIYAASSLQSGVPSRFSGSGSGTDFTLTISSLQPEDFATYYCQQYDSYPITFGQGTRLEIK

SEQ ID NO: 6398 - protein, 6 aa, synthetic construct
  REGION 1..6: note = iratumumab light chain CDR1
QGISSW

SEQ ID NO: 6399 - skipped

SEQ ID NO: 6400 - protein, 9 aa, synthetic construct
  REGION 1..9: note = iratumumab light chain CDR3
QQYDSYPIT

SEQ ID NO: 6401 - protein, 120 aa, synthetic construct [sequence omitted]

SEQ ID NO: 6402 - protein, 8 aa, synthetic construct
  REGION 1..8: note = isatuximab heavy chain CDR1
GYTFTDYW

SEQ ID NO: 6403 - protein, 8 aa, synthetic construct
  REGION 1..8: note = isatuximab heavy chain CDR2
IYPGDGDT

SEQ ID NO: 6404 - protein, 13 aa, synthetic construct
  REGION 1..13: note = isatuximab heavy chain CDR3
ARGDYYGSNSLDY

SEQ ID NO: 6405 - protein, 107 aa, synthetic construct [sequence omitted]

SEQ ID NO: 6406 - protein, 6 aa, synthetic construct
  REGION 1..6: note = isatuximab light chain CDR1
QDVSTV

SEQ ID NO: 6407 - skipped

SEQ ID NO: 6408 - protein, 9 aa, synthetic construct
  REGION 1..9: note = isatuximab light chain CDR3
QQHYSPPYT

SEQ ID NO: 6409 - protein, 120 aa, synthetic construct
  REGION 1..120: note = iscalimab heavy chain V region
QVQLVESGGGVVQPGRSLRLSCAASGFTFSSYGMHWVRQAPGKGLEWVAVISYEESNRYHADSVKGRFTISRDNSKITLYLQMNSLRTEDTAVYYCARDGGIAAPGPDYWGQGTLVTVSS

SEQ ID NO: 6410 - protein, 7 aa, synthetic construct
  REGION 1..7: note = iscalimab heavy chain CDR1
GFTFSSY

SEQ ID NO: 6411 - protein, 8 aa, synthetic construct
  REGION 1..8: note = iscalimab heavy chain CDR2
ISYEESNR

SEQ ID NO: 6412 - protein, 13 aa, synthetic construct
  REGION 1..13: note = iscalimab heavy chain CDR3
ARDGGIAAPGPDY

SEQ ID NO: 6413 - protein, 112 aa, synthetic construct
  REGION 1..112: note = iscalimab light chain V region
DIVMTQSPLSLTVTPGEPASISCRSSQSLLYSNGYNYLDWYLQKPGQSPQVLISLGSNRASGVPDRFSGSGSGTDFTLKISRVEAEDVGVYYCMQARQTPFTFGPGTKVDIR

SEQ ID NO: 6414 - protein, 11 aa, synthetic construct
  REGION 1..11: note = iscalimab light chain CDR1
QSLLYSNGYNY

SEQ ID NO: 6415 - skipped

SEQ ID NO: 6416 - protein, 9 aa, synthetic construct
  REGION 1..9: note = iscalimab light chain CDR3
MQARQTPFT

SEQ ID NO: 6417 - protein, 122 aa, synthetic construct
  REGION 1..122: note = itepekimab heavy chain V region
EVQLVESGGNLEQPGGSLRLSCTASGFTFSRSAMNWVRRAPGKGLEWVSGISGSGGRTYYADSVKGRFTISRDNSKNTLYLQMNSLSAEDTAAYYCAKDSYTTSWYGGMDVWGHGTTVTVSS

SEQ ID NO: 6418 - protein, 8 aa, synthetic construct
  REGION 1..8: note = itepekimab heavy chain CDR1
GFTFSRSA

SEQ ID NO: 6419 - protein, 8 aa, synthetic construct
  REGION 1..8: note = itepekimab heavy chain CDR2
ISGSGGRT

SEQ ID NO: 6420 - protein, 15 aa, synthetic construct
  REGION 1..15: note = itepekimab heavy chain CDR3
AKDSYTTSWYGGMDV

SEQ ID NO: 6421 - protein, 107 aa, synthetic construct
  REGION 1..107: note = itepekimab light chain V region
DIQMTQSPSSVSASVGDRVTITCRASQGIFSWLAWYQQKPGKAPKLLIYAASSLQSGVPSRFSGSGSGTDFTLTISSLQPEDFAIYYCQQANSVPITFGQGTRLEIK

SEQ ID NO: 6422 - protein, 6 aa, synthetic construct
  REGION 1..6: note = itepekimab light chain CDR1
QGIFSW

SEQ ID NO: 6423 - skipped

SEQ ID NO: 6424 - protein, 9 aa, synthetic construct
  REGION 1..9: note = itepekimab light chain CDR3
QQANSVPIT

SEQ ID NO: 6425 - protein, 119 aa, synthetic construct
  REGION 1..119: note = itolizumab heavy chain V region
EVQLVESGGGLVKPGGSLKLSCAASGFKFSRYAMSWVRQAPGKRLEWVATISSGGSYIYYPDSVKGRFTISRDNVKNTLYLQMSSLRSEDTAMYYCARRDYDLDYFDSWGQGTLVTVSS

SEQ ID NO: 6426 - protein, 8 aa, synthetic construct
  REGION 1..8: note = itolizumab heavy chain CDR1
GFKFSRYA

SEQ ID NO: 6427 - protein, 7 aa, synthetic construct
  REGION 1..7: note = itolizumab heavy chain CDR2
ISSGGSY

SEQ ID NO: 6428 - protein, 12 aa, synthetic construct
  REGION 1..12: note = itolizumab heavy chain CDR3
ARRDYDLDYFDS

SEQ ID NO: 6429 - protein, 107 aa, synthetic construct
  REGION 1..107: note = itolizumab light chain V region
DIQMTQSPSSLSASVGDRVTITCKASRDIRSYLTWYQQKPGKAPKTLIYYATSLADGVPSRFSGSGSGQDYSLTISSLESDDTATYYCLQHGESPFTLGSGTKLEIK

SEQ ID NO: 6430 - protein, 7 aa, synthetic construct
  REGION 1..7: note = itolizumab light chain CDR1
RDIRSYL

SEQ ID NO: 6431 - skipped

SEQ ID NO: 6432 - protein, 13 aa, synthetic construct
  REGION 1..13: note = itolizumab light chain CDR3
LQHGESPFTLGSG

SEQ ID NO: 6433 - protein, 118 aa, synthetic construct
  REGION 1..118: note = ivuxolimab heavy chain V region
EVQLVESGGGLVQPGGSLRLSCAASGFTFSSYSMNWVRQAPGKGLEWVSYISSSSSTIDYADSVKGRFTISRDNAKNSLYLQMNSLRDEDTAVYYCARESGWYLFDYWGQGTLVTVSS

SEQ ID NO: 6434 - protein, 8 aa, synthetic construct
  REGION 1..8: note = ivuxolimab heavy chain CDR1
GFTFSSYS

SEQ ID NO: 6435 - protein, 8 aa, synthetic construct
  REGION 1..8: note = ivuxolimab heavy chain CDR2
ISSSSSTI

SEQ ID NO: 6436 - protein, 11 aa, synthetic construct
  REGION 1..11: note = ivuxolimab heavy chain CDR3
ARESGWYLFDY

SEQ ID NO: 6437 - protein, 107 aa, synthetic construct
  REGION 1..107: note = ivuxolimab light chain V region
DIQMTQSPSSLSASVGDRVTITCRASQGISSWLAWYQQKPEKAPKSLIYAASSLQSGVPSRFSGSGSGTDFTLTISSLQPEDFATYYCQQYNSYPPTFGGGTKVEIK

SEQ ID NO: 6438 - protein, 6 aa, synthetic construct
  REGION 1..6: note = ivuxolimab light chain CDR1
QGISSW

SEQ ID NO: 6439 - skipped

SEQ ID NO: 6440 - protein, 9 aa, synthetic construct
  REGION 1..9: note = ivuxolimab light chain CDR3
QQYNSYPPT

SEQ ID NO: 6441 - protein, 119 aa, synthetic construct
  REGION 1..119: note = ixekizumab heavy chain V region
QVQLVQSGAEVKKPGSSVKVSCKASGYSFTDYHIHWVRQAPGQGLEWMGVINPMYGTTDYNQRFKGRVTITADESTSTAYMELSSLRSEDTAVYYCARYDYFTGTGVYWGQGTLVTVSS

SEQ ID NO: 6442 - protein, 8 aa, synthetic construct
  REGION 1..8: note = ixekizumab heavy chain CDR1
GYSFTDYH

SEQ ID NO: 6443 - protein, 8 aa, synthetic construct
  REGION 1..8: note = ixekizumab heavy chain CDR2
INPMYGTT

SEQ ID NO: 6444 - protein, 12 aa, synthetic construct
  REGION 1..12: note = ixekizumab heavy chain CDR3
ARYDYFTGTGVY

SEQ ID NO: 6445 - protein, 112 aa, synthetic construct
  REGION 1..112: note = ixekizumab light chain V region
DIVMTQTPLSLSVTPGQPASISCRSSRSLVHSRGNTYLHWYLQKPGQSPQLLIYKVSNRFIGVPDRFSGSGSGTDFTLKISRVEAEDVGVYYCSQSTHLPFTFGQGTKLEIK

SEQ ID NO: 6446 - protein, 11 aa, synthetic construct
  REGION 1..11: note = ixekizumab light chain CDR1
RSLVHSRGNTY

SEQ ID NO: 6447 - skipped

SEQ ID NO: 6448 - protein, 9 aa, synthetic construct
  REGION 1..9: note = ixekizumab light chain CDR3
SQSTHLPFT

SEQ ID NO: 6449 - protein, 122 aa, synthetic construct
  REGION 1..122: note = lanadelumab heavy chain V region
EVQLLESGGGLVQPGGSLRLSCAASGFTFSHYIMMWVRQAPGKGLEWVSGIYSSGGITVYADSVKGRFTISRDNSKNTLYLQMNSLRAEDTAVYYCAYRRIGVPRRDEFDIWGQGTMVTVSS

SEQ ID NO: 6450 - protein, 8 aa, synthetic construct
  REGION 1..8: note = lanadelumab heavy chain CDR1
GFTFSHYI

SEQ ID NO: 6451 - protein, 8 aa, synthetic construct
  REGION 1..8: note = lanadelumab heavy chain CDR2
IYSSGGIT

SEQ ID NO: 6452 - protein, 15 aa, synthetic construct
  REGION 1..15: note = lanadelumab heavy chain CDR3
AYRRIGVPRRDEFDI

SEQ ID NO: 6453 - protein, 106 aa, synthetic construct
  REGION 1..106: note = lanadelumab light chain V region
DIQMTQSPSTLSASVGDRVTITCRASQSISSWLAWYQQKPGKAPKLLIYKASTLESGVPSRFSGSGSGTEFTLTISSLQPDDFATYYCQQYNTYWTFGQGTKVEIK

SEQ ID NO: 6454 - protein, 6 aa, synthetic construct
  REGION 1..6: note = lanadelumab light chain CDR1
QSISSW

SEQ ID NO: 6455 - skipped

SEQ ID NO: 6456 - protein, 8 aa, synthetic construct
  REGION 1..8: note = lanadelumab light chain CDR3
QQYNTYWT

SEQ ID NO: 6457 - protein, 122 aa, synthetic construct
  REGION 1..122: note = latozinemab heavy chain V region
QVQLQESGPGLVKPSETLSLTCAVSGYSISSGYYWGWIRQPPGKGLEWIGTIYHSGSTYYNPSLKSRVTISVDTSKNQFSLKLSSVTAADTAVYYCARQGSIKQGYYGMDVWGQGTTVTVSS

SEQ ID NO: 6458 - protein, 9 aa, synthetic construct
  REGION 1..9: note = latozinemab heavy chain CDR1
GYSISSGYY

SEQ ID NO: 6459 - protein, 7 aa, synthetic construct
  REGION 1..7: note = latozinemab heavy chain CDR2
IYHSGST

SEQ ID NO: 6460 - protein, 15 aa, synthetic construct
  REGION 1..15: note = latozinemab heavy chain CDR3
ARQGSIKQGYYGMDV

SEQ ID NO: 6461 - protein, 112 aa, synthetic construct
  REGION 1..112: note = latozinemab light chain V region
DIVMTQSPLSLPVTPGEPASISCRSSQSLLRSTGYNYLDWYLQKPGQSPQLLIYLGSNRASGVPDRFSGSGSGTDFTLKISRAEAEDVGVYYCMQQQEAPLTFGGGTKVEIK

SEQ ID NO: 6462 - protein, 12 aa, synthetic construct
  REGION 1..12: note = latozinemab light chain CDR1
QSLLRSTGYNYL

SEQ ID NO: 6463 - skipped

SEQ ID NO: 6464 - protein, 9 aa, synthetic construct
  REGION 1..9: note = latozinemab light chain CDR3
MQQQEAPLT

SEQ ID NO: 6465 - protein, 118 aa, synthetic construct
  REGION 1..118: note = lemzoparlimab heavy chain V region
EVQLVESGGGLVKPGGSLRLSCAASGLTFERAWMNWVRQAPGKGLEWVGRIKRKTDGETTDYAAPVKGRFSISRDDSKNTLYLQMNSLKTEDTAVYYCAGSNRAFDIWGQGTMVTVSS

SEQ ID NO: 6466 - protein, 8 aa, synthetic construct
  REGION 1..8: note = lemzoparlimab heavy chain CDR1
GLTFERAW

SEQ ID NO: 6467 - protein, 10 aa, synthetic construct
  REGION 1..10: note = lemzoparlimab heavy chain CDR2
IKRKTDGETT

SEQ ID NO: 6468 - protein, 9 aa, synthetic construct
  REGION 1..9: note = lemzoparlimab heavy chain CDR3
AGSNRAFDI

SEQ ID NO: 6469 - protein, 113 aa, synthetic construct
  REGION 1..113: note = lemzoparlimab light chain V region
DIVMTQSPDSLAVSLGERATINCKSSQSVLYAGNNRNYLAWYQQKPGQPPKLLINQASTRASGVPDRFSGSGSGTEFTLIISSLQAEDVAIYYCQQYYTPPLAFGGGTKLEIK

SEQ ID NO: 6470 - protein, 12 aa, synthetic construct
  REGION 1..12: note = lemzoparlimab light chain CDR1
QSVLYAGNNRNY

SEQ ID NO: 6471 - skipped

SEQ ID NO: 6472 - protein, 9 aa, synthetic construct
  REGION 1..9: note = lemzoparlimab light chain CDR3
QQYYTPPLA

SEQ ID NO: 6473 - protein, 119 aa, synthetic construct [sequence omitted]

SEQ ID NO: 6474 - protein, 9 aa, synthetic construct
  REGION 1..9: note = lenzilumab heavy chain CDR1
GYSFTNYYI

SEQ ID NO: 6475 - protein, 8 aa, synthetic construct
  REGION 1..8: note = lenzilumab heavy chain CDR2
INAGNGNT

SEQ ID NO: 6476 - protein, 12 aa, synthetic construct
  REGION 1..12: note = lenzilumab heavy chain CDR3
VRRQRFPYYFDY

SEQ ID NO: 6477 - protein, 107 aa, synthetic construct [sequence omitted]

SEQ ID NO: 6478 - protein, 6 aa, synthetic construct
  REGION 1..6: note = lenzilumab light chain CDR1
QSVGTN

SEQ ID NO: 6479 - skipped

SEQ ID NO: 6480 - protein, 9 aa, synthetic construct
  REGION 1..9: note = lenzilumab light chain CDR3
QQFNKSPLT

SEQ ID NO: 6481 - protein, 123 aa, synthetic construct
  REGION 1..123: note = lesofavumab heavy chain V region
EVQLVQSGAEVKKPGESLKISCKVSGYSFTSQWIGWVRQMPGKGLEWIGMMYPGESETIYSPSFQGQVTISADNSISTAYLQWSSLKASDTAIYYCASGPGYSGYHYGWFDTWGQGTLVTVSS

SEQ ID NO: 6482 - protein, 8 aa, synthetic construct
  REGION 1..8: note = lesofavumab heavy chain CDR1
GYSFTSQW

SEQ ID NO: 6483 - protein, 8 aa, synthetic construct
  REGION 1..8: note = lesofavumab heavy chain CDR2
MYPGESET

SEQ ID NO: 6484 - protein, 16 aa, synthetic construct
  REGION 1..16: note = lesofavumab heavy chain CDR3
ASGPGYSGYHYGWFDT

SEQ ID NO: 6485 - protein, 112 aa, synthetic construct
  REGION 1..112: note = lesofavumab light chain V region
DIVMTQSPLSLPVTPGEPASISCRSSQSLLRSNGYNYLDWYLQKPGQSPQLLIYLGSNRASGVPDRFSGSGSGTDFTLKISRVEAEDVGVYYCMQALQTPYTFGQGTKLEIK

SEQ ID NO: 6486 - protein, 11 aa, synthetic construct
  REGION 1..11: note = lesofavumab light chain CDR1
QSLLRSNGYNY

SEQ ID NO: 6487 - skipped

SEQ ID NO: 6488 - protein, 9 aa, synthetic construct
  REGION 1..9: note = lesofavumab light chain CDR3
MQALQTPYT

SEQ ID NO: 6489 - protein, 115 aa, synthetic construct
  REGION 1..115: note = letaplimab heavy chain V region
QVQLQESGPGLVKPSETLSLTCTVSGGSISSYYWSWIRQPPGKGLEWIGYIYYSGSTNYNPSLKSRVTISVDTSKNQFSLKLSSVTAADTAVYYCARGKTGSAAWGQGTLVTVSS

SEQ ID NO: 6490 - protein, 8 aa, synthetic construct
  REGION 1..8: note = letaplimab heavy chain CDR1
GGSISSYY

SEQ ID NO: 6491 - protein, 8 aa, synthetic construct
  REGION 1..8: note = letaplimab heavy chain CDR2
IYYSGSTN

SEQ ID NO: 6492 - protein, 9 aa, synthetic construct
  REGION 1..9: note = letaplimab heavy chain CDR3
ARGKTGSAA

SEQ ID NO: 6493 - protein, 107 aa, synthetic construct
  REGION 1..107: note = letaplimab light chain V region
DIQMTQSPSSVSASVGDRVTITCRASQGISRWLAWYQQKPGKAPKLLIYAASSLQSGVPSRFSGSGSGTDFTLTISSLQPEDFATYYCQQTVSFPITFGGGTKVEIK

SEQ ID NO: 6494 - protein, 6 aa, synthetic construct
  REGION 1..6: note = letaplimab light chain CDR1
QGISRW

SEQ ID NO: 6495 - skipped

SEQ ID NO: 6496 - protein, 9 aa, synthetic construct
  REGION 1..9: note = letaplimab light chain CDR3
QQTVSFPIT

SEQ ID NO: 6497 - protein, 121 aa, synthetic construct
  REGION 1..121: note = lexatumumab heavy chain V region
EVQLVQSGGGVERPGGSLRLSCAASGFTFDDYGMSWVRQAPGKGLEWVSGINWNGGSTGYADSVKGRVTISRDNAKNSLYLQMNSLRAEDTAVYYCAKILGAGRGWYFDLWGKGTTVTVSS

SEQ ID NO: 6498 - protein, 8 aa, synthetic construct
  REGION 1..8: note = lexatumumab heavy chain CDR1
GFTFDDYG

SEQ ID NO: 6499 - protein, 8 aa, synthetic construct
  REGION 1..8: note = lexatumumab heavy chain CDR2
INWNGGST

SEQ ID NO: 6500 - protein, 14 aa, synthetic construct
  REGION 1..14: note = lexatumumab heavy chain CDR3
AKILGAGRGWYFDL

SEQ ID NO: 6501 - protein, 108 aa, synthetic construct
  REGION 1..108: note = lexatumumab light chain V region
SSELTQDPAVSVALGQTVRITCQGDSLRSYYASWYQQKPGQAPVLVIYGKNNRPSGIPDRFSGSSSGNTASLTITGAQAEDEADYYCNSRDSSGNHVVFGGGTKLTVL

SEQ ID NO: 6502 - protein, 9 aa, synthetic construct
  REGION 1..9: note = lexatumumab light chain CDR1
QGDSLRSYY

SEQ ID NO: 6503 - skipped

SEQ ID NO: 6504 - protein, 11 aa, synthetic construct
  REGION 1..11: note = lexatumumab light chain CDR3
NSRDSSGNHVV

SEQ ID NO: 6505 - protein, 116 aa, synthetic construct
  REGION 1..116: note = lintuzumab satetraxetan heavy chain V region
QVQLVQSGAEVKKPGSSVKVSCKASGYTFTDYNMHWVRQAPGQGLEWIGYIYPYNGGTGYNQKFKSKATITADESTNTAYMELSSLRSEDTAVYYCARGRPAMDYWGQGTLVTVSS

SEQ ID NO: 6506 - protein, 8 aa, synthetic construct
  REGION 1..8: note = lintuzumab satetraxetan heavy chain CDR1
GYTFTDYN

SEQ ID NO: 6507 - protein, 8 aa, synthetic construct
  REGION 1..8: note = lintuzumab satetraxetan heavy chain CDR2
IYPYNGGT

SEQ ID NO: 6508 - protein, 9 aa, synthetic construct
  REGION 1..9: note = lintuzumab satetraxetan heavy chain CDR3
ARGRPAMDY

SEQ ID NO: 6509 - protein, 111 aa, synthetic construct
  REGION 1..111: note = lintuzumab satetraxetan light chain V region
DIQMTQSPSSLSASVGDRVTITCRASESVDNYGISFMNWFQQKPGKAPKLLIYAASNQGSGVPSRFSGSGSGTDFTLTISSLQPDDFATYYCQQSKEVPWTFGQGTKVEIK

SEQ ID NO: 6510 - protein, 10 aa, synthetic construct
  REGION 1..10: note = lintuzumab satetraxetan light chain CDR1
ESVDNYGISF

SEQ ID NO: 6511 - skipped

SEQ ID NO: 6512 - protein, 9 aa, synthetic construct
  REGION 1..9: note = lintuzumab satetraxetan light chain CDR3
QQSKEVPWT

SEQ ID NO: 6513 - protein, 123 aa, synthetic construct
  REGION 1..123: note = lirilumab heavy chain V region
QVQLVQSGAEVKKPGSSVKVSCKASGGTFSFYAISWVRQAPGQGLEWMGGFIPIFGAANYAQKFQGRVTITADESTSTAYMELSSLRSDDTAVYYCARIPSGSYYYDYDMDVWGQGTTVTVSS

SEQ ID NO: 6514 - protein, 8 aa, synthetic construct
  REGION 1..8: note = lirilumab heavy chain CDR1
GGTFSFYA

SEQ ID NO: 6515 - protein, 7 aa, synthetic construct
  REGION 1..7: note = lirilumab heavy chain CDR2
IPIFGAA

SEQ ID NO: 6516 - protein, 16 aa, synthetic construct
  REGION 1..16: note = lirilumab heavy chain CDR3
ARIPSGSYYYDYDMDV

SEQ ID NO: 6517 - protein, 107 aa, synthetic construct
  REGION 1..107: note = lirilumab light chain V region
EIVLTQSPVTLSLSPGERATLSCRASQSVSSYLAWYQQKPGQAPRLLIYDASNRATGIPARFSGSGSGTDFTLTISSLEPEDFAVYYCQQRSNWMYTFGQGTKLEIK

SEQ ID NO: 6518 - protein, 6 aa, synthetic construct
  REGION 1..6: note = lirilumab light chain CDR1
QSVSSY

SEQ ID NO: 6519 - skipped

SEQ ID NO: 6520 - protein, 9 aa, synthetic construct
  REGION 1..9: note = lirilumab light chain CDR3
QQRSNWMYT

SEQ ID NO: 6521 - protein, 123 aa, synthetic construct
  REGION 1..123: note = lodapolimab heavy chain V region
QVQLVQSGAEVKKPGSSVKVSCKASGGTFSSYAISWVRQAPGQGLEWMGGIIPIFGTANYAQKFQGRVTITADKSTSTAYMELSSLRSEDTAVYYCARSPDYSPYYYYGMDVWGQGTTVTVSS

SEQ ID NO: 6522 - protein, 7 aa, synthetic construct
  REGION 1..7: note = lodapolimab heavy chain CDR1
GGTFSSY

SEQ ID NO: 6523 - protein, 8 aa, synthetic construct
  REGION 1..8: note = lodapolimab heavy chain CDR2
IIPIFGTA

SEQ ID NO: 6524 - protein, 16 aa, synthetic construct
  REGION 1..16: note = lodapolimab heavy chain CDR3
ARSPDYSPYYYYGMDV

SEQ ID NO: 6525 - protein, 110 aa, synthetic construct
  REGION 1..110: note = lodapolimab light chain V region
QSVLTQPPSASGTPGQRVTISCSGSSSNIGSNTVNWYQQLPGTAPKLLIYGNSNRPSGVPDRFSGSKSGTSASLAISGLQSEDEADYYCQSYDSSLSGSVFGGGIKLTVL

SEQ ID NO: 6526 - protein, 9 aa, synthetic construct
  REGION 1..9: note = lodapolimab light chain CDR1
SSSNIGSNT

SEQ ID NO: 6527 - skipped

SEQ ID NO: 6528 - protein, 11 aa, synthetic construct
  REGION 1..11: note = lodapolimab light chain CDR3
QSYDSSLSGSV

SEQ ID NO: 6529 - protein, 118 aa, synthetic construct
  REGION 1..118: note = lokivetmab heavy chain V region
EVQLVESGGDLVKPGGSLRLSCVASGFTFSNYGMSWVRQAPGKGLQWVATISYGGSYTYYPDNIKGRFTISRDNAKNTLYLQMNSLRAEDTAMYYCVRGYGYDTMDYWGQGTLVTVSS

SEQ ID NO: 6530 - protein, 8 aa, synthetic construct
  REGION 1..8: note = lokivetmab heavy chain CDR1
GFTFSNYG

SEQ ID NO: 6531 - protein, 8 aa, synthetic construct
  REGION 1..8: note = lokivetmab heavy chain CDR2
ISYGGSYT

SEQ ID NO: 6532 - protein, 11 aa, synthetic construct
  REGION 1..11: note = lokivetmab heavy chain CDR3
VRGYGYDTMDY

SEQ ID NO: 6533 - protein, 111 aa, synthetic construct
  REGION 1..111: note = lokivetmab light chain V region
EIVMTQSPASLSLSQEEKVTITCKASQSVSFAGTGLMHWYQQKPGQAPKLLIYRASNLEAGVPSRFSGSGSGTDFSFTISSLEPEDVAVYYCQQSREYPWTFGQGTKLEIK

SEQ ID NO: 6534 - protein, 8 aa, synthetic construct
  REGION 1..8: note = lokivetmab light chain CDR1
QSVSFAGT

SEQ ID NO: 6535 - skipped

SEQ ID NO: 6536 - protein, 9 aa, synthetic construct
  REGION 1..9: note = lokivetmab light chain CDR3
QQSREYPWT

SEQ ID NO: 6537 - protein, 120 aa, synthetic construct
  REGION 1..120: note = lomtegovimab heavy chain V region
QVQLVESGGGVVQPGRSLRLSCAATGFTFRRYGMHWVRQAPGKGLEWVAGILFDGSNKYYVDSVKGRFTISRDSSRNTLYLQLNSLRREDTAVYYCAKGGDYEWELLESWGQGTLVTVSS

SEQ ID NO: 6538 - protein, 8 aa, synthetic construct
  REGION 1..8: note = lomtegovimab heavy chain CDR1
GFTFRRYG

SEQ ID NO: 6539 - protein, 8 aa, synthetic construct
  REGION 1..8: note = lomtegovimab heavy chain CDR2
ILFDGSNK

SEQ ID NO: 6540 - protein, 13 aa, synthetic construct
  REGION 1..13: note = lomtegovimab heavy chain CDR3
AKGGDYEWELLES

SEQ ID NO: 6541 - protein, 107 aa, synthetic construct
  REGION 1..107: note = lomtegovimab light chain V region
DIQMTQSPSTVSASVGDRVTITCRASQSIDNWLAWYQEKPGKAPKVLIYKASSLESGVPSRFSGRGSGTEFTLTISSLQPGDFATYYCQHYHSFPLTFGGGTKVDIK

SEQ ID NO: 6542 - protein, 6 aa, synthetic construct
  REGION 1..6: note = lomtegovimab light chain CDR1
QSIDNW

SEQ ID NO: 6543 - skipped

SEQ ID NO: 6544 - protein, 9 aa, synthetic construct
  REGION 1..9: note = lomtegovimab light chain CDR3
QHYHSFPLT

SEQ ID NO: 6545 - protein, 120 aa, synthetic construct
  REGION 1..120: note = loncastuximab tesirine heavy chain V region
QVQLVQPGAEVVKPGASVKLSCKTSGYTFTSNWMHWVKQAPGQGLEWIGEIDPSDSYTNYNQNFQGKAKLTVDKSTSTAYMEVSSLRSDDTAVYYCARGSNPYYYAMDYWGQGTSVTVSS

SEQ ID NO: 6546 - protein, 8 aa, synthetic construct
  REGION 1..8: note = loncastuximab tesirine heavy chain CDR1
GYTFTSNW

SEQ ID NO: 6547 - protein, 8 aa, synthetic construct
  REGION 1..8: note = loncastuximab tesirine heavy chain CDR2
IDPSDSYT

SEQ ID NO: 6548 - protein, 13 aa, synthetic construct
  REGION 1..13: note = loncastuximab tesirine heavy chain CDR3
ARGSNPYYYAMDY

SEQ ID NO: 6549 - protein, 109 aa, synthetic construct
  REGION 1..109: note = loncastuximab tesirine light chain V region
EIVLTQSPAIMSASPGERVTMTCSASSGVNYMHWYQQKPGTSPRRWIYDTSKLASGVPARSGVNYFSGSGSGTSYSLTISSMEPEDAATYYCHQRGSYTFGGGTKLEIK

SEQ ID NO: 6550 - protein, 5 aa, synthetic construct
  REGION 1..5: note = loncastuximab tesirine light chain CDR1
SGVNY

SEQ ID NO: 6551 - skipped

SEQ ID NO: 6552 - protein, 7 aa, synthetic construct
  REGION 1..7: note = loncastuximab tesirine light chain CDR3
HQRGSYT

SEQ ID NO: 6553 - protein, 120 aa, synthetic construct; identical to SEQ ID NO: 6409
  REGION 1..120: note = lucatumumab heavy chain V region

SEQ ID NO: 6554 - protein, 7 aa, synthetic construct
  REGION 1..7: note = lucatumumab heavy chain CDR1
GFTFSSY

SEQ ID NO: 6555 - protein, 8 aa, synthetic construct
  REGION 1..8: note = lucatumumab heavy chain CDR2
ISYEESNR

SEQ ID NO: 6556 - protein, 13 aa, synthetic construct
  REGION 1..13: note = lucatumumab heavy chain CDR3
ARDGGIAAPGPDY

SEQ ID NO: 6557 - protein, 112 aa, synthetic construct; identical to SEQ ID NO: 6413
  REGION 1..112: note = lucatumumab light chain V region

SEQ ID NO: 6558 - protein, 11 aa, synthetic construct
  REGION 1..11: note = lucatumumab light chain CDR1
QSLLYSNGYNY

SEQ ID NO: 6559 - skipped

SEQ ID NO: 6560 - protein, 9 aa, synthetic construct
  REGION 1..9: note = lucatumumab light chain CDR3
MQARQTPFT

SEQ ID NO: 6561 - protein, 117 aa, synthetic construct
  REGION 1..117: note = lupartumab heavy chain V region
EVQLLESGGGLVQPGGSLRLSCAASGFTFSNAWMSWVRQAPGKGLEWVSYISSSGSTIYYADSVKGRFTISRDNSKNTLYLQMNSLRAEDTAVYYCAREGLWAFDYWGQGTLVTVSS

SEQ ID NO: 6562 - protein, 8 aa, synthetic construct
  REGION 1..8: note = lupartumab heavy chain CDR1
GFTFSNAW

SEQ ID NO: 6563 - protein, 8 aa, synthetic construct
  REGION 1..8: note = lupartumab heavy chain CDR2
ISSSGSTI

SEQ ID NO: 6564 - protein, 10 aa, synthetic construct
  REGION 1..10: note = lupartumab heavy chain CDR3
AREGLWAFDY

SEQ ID NO: 6565 - protein, 111 aa, synthetic construct
  REGION 1..111: note = lupartumab light chain V region
ESVLTQPPSVSGAPGQRVTISCTGSSSNIGAGYVVHWYQQLPGTAPKLLIYDNNKRPSGVPDRFSGSKSGTSASLAISGLRSEDEADYYCAAWDDRLNGPVFGGGTKLTVL

SEQ ID NO: 6566 - protein, 9 aa, synthetic construct
  REGION 1..9: note = lupartumab light chain CDR1
SSNIGAGYV

SEQ ID NO: 6567 - skipped

SEQ ID NO: 6568 - protein, 11 aa, synthetic construct
  REGION 1..11: note = lupartumab light chain CDR3
AAWDDRLNGPV

SEQ ID NO: 6569 - protein, 117 aa, synthetic construct; identical to SEQ ID NO: 6561
  REGION 1..117: note = lupartumab amadotin heavy chain V region

SEQ ID NO: 6570 - protein, 8 aa, synthetic construct
  REGION 1..8: note = lupartumab amadotin heavy chain CDR1
GFTFSNAW

SEQ ID NO: 6571 - protein, 8 aa, synthetic construct
  REGION 1..8: note = lupartumab amadotin heavy chain CDR2
ISSSGSTI

SEQ ID NO: 6572 - protein, 10 aa, synthetic construct
  REGION 1..10: note = lupartumab amadotin heavy chain CDR3
AREGLWAFDY

SEQ ID NO: 6573 - protein, 111 aa, synthetic construct; identical to SEQ ID NO: 6565
  REGION 1..111: note = lupartumab amadotin light chain V region

SEQ ID NO: 6574 - protein, 9 aa, synthetic construct
  REGION 1..9: note = lupartumab amadotin light chain CDR1
SSNIGAGYV

SEQ ID NO: 6575 - skipped

SEQ ID NO: 6576 - protein, 11 aa, synthetic construct
  REGION 1..11: note = lupartumab amadotin light chain CDR3
AAWDDRLNGPV

SEQ ID NO: 6577 - protein, 118 aa, synthetic construct
  REGION 1..118: note = maftivimab heavy chain V region
EVQLVESGGGLVQPGGSLRLSCAASGFTSSSYAMNWVRQAPGKGLEWVSTISGMGGSTYYADSVKGRFTISRDNSKNTLYLQMNSLRAEDTAVYYCAKRGYPHSFDIWGQGTMVTVSS

SEQ ID NO: 6578 - protein, 7 aa, synthetic construct
  REGION 1..7: note = maftivimab heavy chain CDR1
GFTSSSY

SEQ ID NO: 6579 - protein, 8 aa, synthetic construct
  REGION 1..8: note = maftivimab heavy chain CDR2
ISGMGGST

SEQ ID NO: 6580 - protein, 11 aa, synthetic construct
  REGION 1..11: note = maftivimab heavy chain CDR3
AKRGYPHSFDI

SEQ ID NO: 6581 - protein, 106 aa, synthetic construct
  REGION 1..106: note = maftivimab light chain V region
DIQMTQSPSSLSASVGDRVTITCRASQSISSFLNWYQQKPGKAPKLLIYAASSLQSGVPSRFSGSGSGTDFTLTISSLQPEDFATYYCQQSYSTLTFGQGTRLEIK

SEQ ID NO: 6582 - protein, 6 aa, synthetic construct
  REGION 1..6: note = maftivimab light chain CDR1
QSISSF

SEQ ID NO: 6583 - skipped

SEQ ID NO: 6584 - protein, 8 aa, synthetic construct
  REGION 1..8: note = maftivimab light chain CDR3
QQSYSTLT

SEQ ID NO: 6585 - protein, 122 aa, synthetic construct
  REGION 1..122: note = manelimab heavy chain V region
EVQLVESGGGVVRPGGSLRLSCAASGFTFDDYAMSWVRQAPGKGLEWVSDISWSGSNTNYADSVKGRFTISRDNAKNSLYLQMNSLRAEDTALYHCARAPLLLAMTFGVGSWGQGTLVTVSS

SEQ ID NO: 6586 - protein, 8 aa, synthetic construct
  REGION 1..8: note = manelimab heavy chain CDR1
GFTFDDYA

SEQ ID NO: 6587 - protein, 8 aa, synthetic construct
  REGION 1..8: note = manelimab heavy chain CDR2
ISWSGSNT

SEQ ID NO: 6588 - protein, 15 aa, synthetic construct
  REGION 1..15: note = manelimab heavy chain CDR3
ARAPLLLAMTFGVGS

SEQ ID NO: 6589 - protein, 110 aa, synthetic construct
  REGION 1..110: note = manelimab light chain V region
QTVVTQEPSLSVSPGGTVTLTCGLSSGTVTAINYPGWYQQTPGQAPRTLIYNTNTRHSGVPDRFSGSISGNKAALTITGAQAEDEADYYCALYMGNGGHMFGGGTKLTVL

SEQ ID NO: 6590 - protein, 9 aa, synthetic construct
  REGION 1..9: note = manelimab light chain CDR1
SGTVTAINY

SEQ ID NO: 6591 - skipped

SEQ ID NO: 6592 - protein, 10 aa, synthetic construct
  REGION 1..10: note = manelimab light chain CDR3
ALYMGNGGHM

SEQ ID NO: 6593 - protein, 120 aa, synthetic construct
  REGION 1..120: note = margetuximab heavy chain V region
QVQLQQSGPELVKPGASLKLSCTASGFNIKDTYIHWVKQRPEQGLEWIGRIYPTNGYTRYDPKFQDKATITADTSSNTAYLQVSRLTSEDTAVYYCSRWGGDGFYAMDYWGQGASVTVSS

SEQ ID NO: 6594 - protein, 8 aa, synthetic construct
  REGION 1..8: note = margetuximab heavy chain CDR1
GFNIKDTY

SEQ ID NO: 6595 - protein, 8 aa, synthetic construct
  REGION 1..8: note = margetuximab heavy chain CDR2
IYPTNGYT

SEQ ID NO: 6596 - protein, 13 aa, synthetic construct
  REGION 1..13: note = margetuximab heavy chain CDR3
SRWGGDGFYAMDY

SEQ ID NO: 6597 - protein, 107 aa, synthetic construct
  REGION 1..107: note = margetuximab light chain V region
DIVMTQSHKFMSTSVGDRVSITCKASQDVNTAVAWYQQKPGHSPKLLIYSASFRYTGVPDRFTGSRSGTDFTFTISSVQAEDLAVYYCQQHYTTPPTFGGGTKVEIK

SEQ ID NO: 6598 - protein, 5 aa, synthetic construct
  REGION 1..5: note = margetuximab light chain CDR1
QDVNT

SEQ ID NO: 6599 - skipped

SEQ ID NO: 6600 - protein, 9 aa, synthetic construct
  REGION 1..9: note = margetuximab light chain CDR3
QQHYTTPPT

SEQ ID NO: 6601 - protein, 120 aa, synthetic construct
  REGION 1..120: note = marstacimab heavy chain V region
EVQLLESGGGLVQPGGSLRLSCAASGFTFSSYAMSWVRQAPGKGLEWVSAISGSGGSTYYADSVKGRFTISRDNSKNTLYLQMNSLRAEDTAVYYCAILGATSLSAFDIWGQGTMVTVSS

SEQ ID NO: 6602 - protein, 7 aa, synthetic construct
  REGION 1..7: note = marstacimab heavy chain CDR1
GFTFSSY

SEQ ID NO: 6603 - protein, 8 aa, synthetic construct
  REGION 1..8: note = marstacimab heavy chain CDR2
ISGSGGST

SEQ ID NO: 6604 - protein, 13 aa, synthetic construct
  REGION 1..13: note = marstacimab heavy chain CDR3
AILGATSLSAFDI

SEQ ID NO: 6605 - protein, 112 aa, synthetic construct
  REGION 1..112: note = marstacimab light chain V region
QSVLTQPPSVSGAPGQRVTISCTGSSSNIGAGYDVHWYQQLPGTAPKLLIYGNSNRPSGVPDRFSGSKSGTSASLAITGLQAEDEADYYCQSYDSSLSGSGVFGGGTKLTVL

SEQ ID NO: 6606 - protein, 9 aa, synthetic construct
  REGION 1..9: note = marstacimab light chain CDR1
SSNIGAGYD

SEQ ID NO: 6607 - skipped

SEQ ID NO: 6608 - protein, 12 aa, synthetic construct
  REGION 1..12: note = marstacimab light chain CDR3
QSYDSSLSGSGV

SEQ ID NO: 6609 - protein, 120 aa, synthetic construct
  REGION 1..120: note = mavrilimumab heavy chain V region
QVQLVQSGAEVKKPGASVKVSCKVSGYTLTELSIHWVRQAPGKGLEWMGGFDPEENEIVYAQRFQGRVTMTEDTSTDTAYMELSSLRSEDTAVYYCAIVGSFSPLTLGLWGQGTMVTVSS

SEQ ID NO: 6610 - protein, 8 aa, synthetic construct
  REGION 1..8: note = mavrilimumab heavy chain CDR1
GYTLTELS

SEQ ID NO: 6611 - protein, 8 aa, synthetic construct
  REGION 1..8: note = mavrilimumab heavy chain CDR2
FDPEENEI

SEQ ID NO: 6612 - protein, 13 aa, synthetic construct
  REGION 1..13: note = mavrilimumab heavy chain CDR3
AIVGSFSPLTLGL

SEQ ID NO: 6613 - protein, 111 aa, synthetic construct
  REGION 1..111: note = mavrilimumab light chain V region
QSVLTQPPSVSGAPGQRVTISCTGSGSNIGAPYDVSWYQQLPGTAPKLLIYHNNKRPSGVPDRFSGSKSGTSASLAITGLQAEDEADYYCATVEAGLSGSVFGGGTKLTVL

SEQ ID NO: 6614 - protein, 9 aa, synthetic construct
  REGION 1..9: note = mavrilimumab light chain CDR1
GSNIGAPYD

SEQ ID NO: 6615 - skipped

SEQ ID NO: 6616 - protein, 11 aa, synthetic construct
  REGION 1..11: note = mavrilimumab light chain CDR3
ATVEAGLSGSV

SEQ ID NO: 6617 - protein, 115 aa, synthetic construct
  REGION 1..115: note = melredableukin alfa heavy chain V region
EVQLLESGGGLVQPGGSLRLSCAASGFTFSSYAMSWVRQAPGKGLEWVSAISGSGGSTYYADSVKGRFTISRDNSKNTLYLQMNSLRAEDTAVYYCAKGSGFDYWGQGTLVTVSS

SEQ ID NO: 6618 - protein, 7 aa, synthetic construct
  REGION 1..7: note = melredableukin alfa heavy chain CDR1
GFTFSSY

SEQ ID NO: 6619 - protein, 8 aa, synthetic construct
  REGION 1..8: note = melredableukin alfa heavy chain CDR2
ISGSGGST

SEQ ID NO: 6620 - protein, 8 aa, synthetic construct
  REGION 1..8: note = melredableukin alfa heavy chain CDR3
AKGSGFDY

SEQ ID NO: 6621 - protein, 108 aa, synthetic construct
  REGION 1..108: note = melredableukin alfa light chain V region
EIVLTQSPGTLSLSPGERATLSCRASQSVSSSYLAWYQQKPGQAPRLLIYGASSRATGIPDRFSGSGSGTDFTLTISRLEPEDFAVYYCQQYGSSPLTFGQGTKVEIK

SEQ ID NO: 6622 - protein, 7 aa, synthetic construct
  REGION 1..7: note = melredableukin alfa light chain CDR1
QSVSSSY

SEQ ID NO: 6623 - skipped

SEQ ID NO: 6624 - protein, 9 aa, synthetic construct
  REGION 1..9: note = melredableukin alfa light chain CDR3
QQYGSSPLT

SEQ ID NO: 6625 - protein, 123 aa, synthetic construct
  REGION 1..123: note = melrilimab heavy chain V region
EVQLLESGGGLVQPGGSLRLSCAASGFTFSIYDMIWVRQAPGKGLEWVSSIRGEGGGTYYADSVKGRFTISRDNSKNTLYLQMNSLRAEDTAVYYCARDPWSTEGSFFVLDYWGQGTLVTVSS

SEQ ID NO: 6626 - protein, 8 aa, synthetic construct
  REGION 1..8: note = melrilimab heavy chain CDR1
GFTFSIYD

SEQ ID NO: 6627 - protein, 8 aa, synthetic construct
  REGION 1..8: note = melrilimab heavy chain CDR2
IRGEGGGT

SEQ ID NO: 6628 - protein, 16 aa, synthetic construct
  REGION 1..16: note = melrilimab heavy chain CDR3
ARDPWSTEGSFFVLDY

SEQ ID NO: 6629 - protein, 107 aa, synthetic construct
  REGION 1..107: note = melrilimab light chain V region
EIVLTQSPATLSLSPGERATLSCRASQSVDDDLAWYQQKPGQAPRLLIYDASNRATGIPARFSGSGSGTDFTLTISSLEPEDFAVYYCQQYITAPLTFGQGTKVEIK

SEQ ID NO: 6630 - protein, 6 aa, synthetic construct
  REGION 1..6: note = melrilimab light chain CDR1
QSVDDD

SEQ ID NO: 6631 - skipped

SEQ ID NO: 6632 - protein, 9 aa, synthetic construct
  REGION 1..9: note = melrilimab light chain CDR3
QQYITAPLT

SEQ ID NO: 6633 - protein, 119 aa, synthetic construct
  REGION 1..119: note = mibavademab heavy chain V region
QVQLVESGGSVVQPGRSLRLSCAASGFTFSTYAMYWVRQTPGKGLEWVAVLYSDGSNKYYIDSVKGRFTISRDTSTNTLYLQMSSLRADDSALYYCARLNWDYWYFDLWGRGTLVTVSS

SEQ ID NO: 6634 - protein, 8 aa, synthetic construct
  REGION 1..8: note = mibavademab heavy chain CDR1
GFTFSTYA

SEQ ID NO: 6635 - protein, 8 aa, synthetic construct
  REGION 1..8: note = mibavademab heavy chain CDR2
LYSDGSNK

SEQ ID NO: 6636 - protein, 12 aa, synthetic construct
  REGION 1..12: note = mibavademab heavy chain CDR3
ARLNWDYWYFDL

SEQ ID NO: 6637 - protein, 108 aa, synthetic construct
  REGION 1..108: note = mibavademab light chain V region
DIQMTQSPSSLSASVGDRVTITCRASQSISSYLNWYQQKPGKAPKLLIYAASSLQSGVPSRFSGSGSGTDFTLTISSLQPEDFATYYCQQSYSTPPITFGQGTRLEIK

SEQ ID NO: 6638 - protein, 6 aa, synthetic construct
  REGION 1..6: note = mibavademab light chain CDR1
QSISSY

SEQ ID NO: 6639 - skipped

SEQ ID NO: 6640 - protein, 10 aa, synthetic construct
  REGION 1..10: note = mibavademab light chain CDR3
QQSYSTPPIT

SEQ ID NO: 6641 - protein, 116 aa, synthetic construct
  REGION 1..116: note = mirzotamab heavy chain V region
EVQLQESGPGLVKPSETLSLTCAVTGYSITSGYSWHWIRQFPGNGLEWMGYIHSSGSTNYNPSLKSRISISRDTSKNQFFLKLSSVTAADTAVYYCAGYDDYFEYWGQGTTVTVSS

SEQ ID NO: 6642 - protein, 9 aa, synthetic construct
  REGION 1..9: note = mirzotamab heavy chain CDR1
GYSITSGYS

SEQ ID NO: 6643 - protein, 7 aa, synthetic construct
  REGION 1..7: note = mirzotamab heavy chain CDR2
IHSSGST

SEQ ID NO: 6644 - protein, 9 aa, synthetic construct
  REGION 1..9: note = mirzotamab heavy chain CDR3
AGYDDYFEY

SEQ ID NO: 6645 - protein, 107 aa, synthetic construct
  REGION 1..107: note = mirzotamab light chain V region
DIQMTQSPSSLSASVGDRVTITCKASQNVGFNVAWYQQKPGKSPKALIYSASYRYSGVPSRFSGSGSGTDFTLTISSLQPEDFAEYFCQQYNWYPFTFGQGTKLEIK

SEQ ID NO: 6646 - protein, 6 aa, synthetic construct
  REGION 1..6: note = mirzotamab light chain CDR1
QNVGFN

SEQ ID NO: 6647 - skipped

SEQ ID NO: 6648 - protein, 10 aa, synthetic construct
  REGION 1..10: note = mirzotamab light chain CDR3
QQYNWYPFTF

SEQ ID NO: 6649 - protein, 116 aa, synthetic construct; identical to SEQ ID NO: 6641
  REGION 1..116: note = mirzotamab clezutoclax heavy chain V region

SEQ ID NO: 6650 - protein, 9 aa, synthetic construct
  REGION 1..9: note = mirzotamab clezutoclax heavy chain CDR1
GYSITSGYS

SEQ ID NO: 6651 - protein, 7 aa, synthetic construct
  REGION 1..7: note = mirzotamab clezutoclax heavy chain CDR2
IHSSGST

SEQ ID NO: 6652 - protein, 9 aa, synthetic construct
  REGION 1..9: note = mirzotamab clezutoclax heavy chain CDR3
AGYDDYFEY

SEQ ID NO: 6653 - protein, 107 aa, synthetic construct; identical to SEQ ID NO: 6645
  REGION 1..107: note = mirzotamab clezutoclax light chain V region

SEQ ID NO: 6654 - protein, 7 aa, synthetic construct
  REGION 1..7: note = mirzotamab clezutoclax light chain CDR1
QNVGFNV

SEQ ID NO: 6655 - skipped

SEQ ID NO: 6656 - protein, 9 aa, synthetic construct
  REGION 1..9: note = mirzotamab clezutoclax light chain CDR3
QQYNWYPFT

SEQ ID NO: 6657 - protein, 119 aa, synthetic construct
  REGION 1..119: note = mogamulizumab heavy chain V region
EVQLVESGGDLVQPGRSLRLSCAASGFIFSNYGMSWVRQAPGKGLEWVATISSASTYSYYPDSVKGRFTISRDNAKNSLYLQMNSLRVEDTALYYCGRHSDGNFAFGYWGQGTLVTVSS

SEQ ID NO: 6658 - protein, 7 aa, synthetic construct
  REGION 1..7: note = mogamulizumab heavy chain CDR1
GFIFSNY

SEQ ID NO: 6659 - protein, 8 aa, synthetic construct
  REGION 1..8: note = mogamulizumab heavy chain CDR2
ISSASTYS

SEQ ID NO: 6660 - protein, 12 aa, synthetic construct
  REGION 1..12: note = mogamulizumab heavy chain CDR3
GRHSDGNFAFGY

SEQ ID NO: 6661 - protein, 112 aa, synthetic construct
  REGION 1..112: note = mogamulizumab light chain V region
DVLMTQSPLSLPVTPGEPASISCRSSRNIVHINGDTYLEWYLQKPGQSPQLLIYKVSNRFSGVPDRFSGSGSGTDFTLKISRVEAEDVGVYYCFQGSLLPWTFGQGTKVEIK

SEQ ID NO: 6662 - protein, 11 aa, synthetic construct
  REGION 1..11: note = mogamulizumab light chain CDR1
RNIVHINGDTY

SEQ ID NO: 6663 - skipped

SEQ ID NO: 6664 - protein, 9 aa, synthetic construct
  REGION 1..9: note = mogamulizumab light chain CDR3
FQGSLLPWT

SEQ ID NO: 6665 - protein, 124 aa, synthetic construct
  REGION 1..124: note = moxetumomab pasudotox heavy chain V region
MEVQLVESGGGLVKPGGSLKLSCAASGFAFSIYDMSWVRQTPEKCLEWVAYISSGGGTTYYPDTVKGRFTISRDNAKNTLYLQMSSLKSEDTAMYYCARHSGYGTHWGVLFAYWGQGTLVTVSA

SEQ ID NO: 6666 - protein, 8 aa, synthetic construct
  REGION 1..8: note = moxetumomab pasudotox heavy chain CDR1
GFAFSIYD

SEQ ID NO: 6667 - protein, 8 aa, synthetic construct
  REGION 1..8: note = moxetumomab pasudotox heavy chain CDR2
ISSGGGTT

SEQ ID NO: 6668 - protein, 16 aa, synthetic construct
  REGION 1..16: note = moxetumomab pasudotox heavy chain CDR3
ARHSGYGTHWGVLFAY

SEQ ID NO: 6669 - protein, 108 aa, synthetic construct
  REGION 1..108: note = moxetumomab pasudotox light chain V region
MDIQMTQTTSSLSASLGDRVTISCRASQDISNYLNWYQQKPDGTVKLLIYYTSILHSGVPSRFSGSGSGTDYSLTISNLEQEDFATYFCQQGNTLPWTFGCGTKLEIK

SEQ ID NO: 6670 - protein, 6 aa, synthetic construct
  REGION 1..6: note = moxetumomab pasudotox light chain CDR1
QDISNY

SEQ ID NO: 6671 - skipped

SEQ ID NO: 6672 - protein, 9 aa, synthetic construct
  REGION 1..9: note = moxetumomab pasudotox light chain CDR3
QQGNTLPWT

SEQ ID NO: 6673 - protein, 124 aa, synthetic construct
  REGION 1..124: note = nadecnemab heavy chain V region
EVQLVESGGGLVQPGGSLRLSCAASGFTFSSYAMSWVRQAPGKGLEWVSVISGSGGSTYYADAVKGRFTISRDNSKHTLYLQMNSLRAEDTAVYYCTKPSSYSSSNFYYGMDVWGQGTTVTVSS

SEQ ID NO: 6674 - protein, 7 aa, synthetic construct
  REGION 1..7: note = nadecnemab heavy chain CDR1
GFTFSSY

SEQ ID NO: 6675 - protein, 8 aa, synthetic construct
  REGION 1..8: note = nadecnemab heavy chain CDR2
ISGSGGST

SEQ ID NO: 6676 - protein, 17 aa, synthetic construct
  REGION 1..17: note = nadecnemab heavy chain CDR3
TKPSSYSSSNFYYGMDV

SEQ ID NO: 6677 - protein, 107 aa, synthetic construct
  REGION 1..107: note = nadecnemab light chain V region
DIQMTQSPSSVSASVGDRVTITCRASQGISSWLAWYQQKPGKAPKLLIYAASSLQSGVPSRFSGSGSGTDFTLTISSLQPEDFATYYCQQTNSFPFPFGPGTKVDIK

SEQ ID NO: 6678 - protein, 6 aa, synthetic construct
  REGION 1..6: note = nadecnemab light chain CDR1
QGISSW

SEQ ID NO: 6679 - skipped

SEQ ID NO: 6680 - protein, 9 aa, synthetic construct
  REGION 1..9: note = nadecnemab light chain CDR3
QQTNSFPFP

SEQ ID NO: 6681 - protein, 119 aa, synthetic construct
  REGION 1..119: note = namilumab heavy chain V region
QVQLVQSGAEVKKPGASVKVSCKAFGYPFTDYLLHWVRQAPGQGLEWVGWLNPYSGDTNYAQKFQGRVTMTRDTSISTAYMELSRLRSDDTAVYYCTRTTLISVYFDYWGQGTMVTVSS

SEQ ID NO: 6682 - protein, 8 aa, synthetic construct
  REGION 1..8: note = namilumab heavy chain CDR1
GYPFTDYL

SEQ ID NO: 6683 - protein, 8 aa, synthetic construct
  REGION 1..8: note = namilumab heavy chain CDR2
LNPYSGDT

SEQ ID NO: 6684 - protein, 12 aa, synthetic construct
  REGION 1..12: note = namilumab heavy chain CDR3
TRTTLISVYFDY

SEQ ID NO: 6685 - protein, 107 aa, synthetic construct
  REGION 1..107: note = namilumab light chain V region
DIQMTQSPSSVSASVGDRVTIACRASQNIRNILNWYQQRPGKAPQLLIYAASNLQSGVPSRFSGSGSGTDFTLTINSLQPEDFATYYCQQSYSMPRTFGGGTKLEIK

SEQ ID NO: 6686 - protein, 6 aa, synthetic construct
  REGION 1..6: note = namilumab light chain CDR1
QNIRNI

SEQ ID NO: 6687 - skipped

SEQ ID NO: 6688 - protein, 9 aa, synthetic construct
  REGION 1..9: note = namilumab light chain CDR3
QQSYSMPRT

SEQ ID NO: 6689 - protein, 122 aa, synthetic construct
  REGION 1..122: note = narnatumab heavy chain V region
EVQLVESGGGLVQPGGSLRLSCAASGFTFSSYLMTWVRQAPGKGLEWVANIKQDGSEKYYVDSVKGRFTISRDNAKNSLNLQMNSLRAEDTAVYYCTRDGYSSGRHYGMDVWGQGTTVIVSS

SEQ ID NO: 6690 - protein, 7 aa, synthetic construct
  REGION 1..7: note = narnatumab heavy chain CDR1
GFTFSSY

SEQ ID NO: 6691 - protein, 8 aa, synthetic construct
  REGION 1..8: note = narnatumab heavy chain CDR2
IKQDGSEK

SEQ ID NO: 6692 - protein, 15 aa, synthetic construct
  REGION 1..15: note = narnatumab heavy chain CDR3
TRDGYSSGRHYGMDV

SEQ ID NO: 6693 - protein, 107 aa, synthetic construct
  REGION 1..107: note = narnatumab light chain V region
EIVLTQSPATLSLSPGERATLSCRASQSVSRYLAWYQQKPGQAPRLLIYDASNRATGIPARFSGSGSGTDFTLTISSLEPEDFAVYYCQQRSNWPRTFGQGTKVEIK

SEQ ID NO: 6694 - protein, 6 aa, synthetic construct
  REGION 1..6: note = narnatumab light chain CDR1
QSVSRY

SEQ ID NO: 6695 - skipped

SEQ ID NO: 6696 - protein, 9 aa, synthetic construct
  REGION 1..9: note = narnatumab light chain CDR3
QQRSNWPRT

SEQ ID NO: 6697 - protein, 118 aa, synthetic construct
  REGION 1..118: note = narsoplimab heavy chain V region
QVTLKESGPVLVKPTETLTLTCTVSGFSLSRGKMGVSWIRQPPGKALEWLAHIFSSDEKSYRTSLKSRLTISKDTSKNQVVLTMTNMDPVDTATYYCARIRRGGIDYWGQGTLVTVSS

SEQ ID NO: 6698 - protein, 10 aa, synthetic construct
  REGION 1..10: note = narsoplimab heavy chain CDR1
GFSLSRGKMG

SEQ ID NO: 6699 - protein, 7 aa, synthetic construct
  REGION 1..7: note = narsoplimab heavy chain CDR2
IFSSDEK

SEQ ID NO: 6700 - protein, 10 aa, synthetic construct
  REGION 1..10: note = narsoplimab heavy chain CDR3
ARIRRGGIDY

SEQ ID NO: 6701 - protein, 106 aa, synthetic construct
  REGION 1..106: note = narsoplimab light chain V region
QPVLTQPPSLSVSPGQTASITCSGEKLGDKYAYWYQQKPGQSPVLVMYQDKQRPSGIPERFSGSNSGNTATLTISGTQAMDEADYYCQAWDSSTAVFGGGTKLTVL

SEQ ID NO: 6702 - protein, 6 aa, synthetic construct
  REGION 1..6: note = narsoplimab light chain CDR1
KLGDKY

SEQ ID NO: 6703 - skipped

SEQ ID NO: 6704 - protein, 9 aa, synthetic construct
  REGION 1..9: note = narsoplimab light chain CDR3
QAWDSSTAV

SEQ ID NO: 6705 - protein, 126 aa, synthetic construct [sequence omitted]

SEQ ID NO: 6706 - protein, 8 aa, synthetic construct
  REGION 1..8: note = navivumab heavy chain CDR1
GYSFSTYG

SEQ ID NO: 6707 - protein, 8 aa, synthetic construct
  REGION 1..8: note = navivumab heavy chain CDR2
ISAYTGIT

SEQ ID NO: 6708 - protein, 19 aa, synthetic construct
  REGION 1..19: note = navivumab heavy chain CDR3
ARDKVQGRVEVGSGGRHDY

SEQ ID NO: 6709 - protein, 108 aa, synthetic construct [sequence omitted]

SEQ ID NO: 6710 - protein, 7 aa, synthetic construct
  REGION 1..7: note = navivumab light chain CDR1
HRVGSTY

SEQ ID NO: 6711 - skipped

SEQ ID NO: 6712 - protein, 9 aa, synthetic construct
  REGION 1..9: note = navivumab light chain CDR3
QQFSVSPWT

SEQ ID NO: 6713 - protein, 119 aa, synthetic construct
  REGION 1..119: note = naxitamab heavy chain V region
QVQLVESGPGVVQPGRSLRISCAVSGFSVTNYGVHWVRQPPGKGLEWLGVIWAGGITNYNSAFMSRLTISKDNSKNTVYLQMNSLRAEDTAMYYCASRGGHYGYALDYWGQGTLVTVSS

SEQ ID NO: 6714 - protein, 8 aa, synthetic construct
  REGION 1..8: note = naxitamab heavy chain CDR1
GFSVTNYG

SEQ ID NO: 6715 - protein, 7 aa, synthetic construct
  REGION 1..7: note = naxitamab heavy chain CDR2
IWAGGIT

SEQ ID NO: 6716 - protein, 13 aa, synthetic construct
  REGION 1..13: note = naxitamab heavy chain CDR3
ASRGGHYGYALDY

SEQ ID NO: 6717 - protein, 104 aa, synthetic construct
  REGION 1..104: note = naxitamab light chain V region
EIVMTQTPATLSVSAGERVTITCKASQSVSNDVTWYQQKPGQAPRLLIYSASNRYSGVPARFSGSGYGTEFTFTISSVQSEDFAVYFCQQDYSSFGQGTKLEIK

SEQ ID NO: 6718 - protein, 6 aa, synthetic construct
  REGION 1..6: note = naxitamab light chain CDR1
QSVSND

SEQ ID NO: 6719 - skipped

SEQ ID NO: 6720 - protein, 6 aa, synthetic construct
  REGION 1..6: note = naxitamab light chain CDR3
QQDYSS

SEQ ID NO: 6721 - protein, 121 aa, synthetic construct [sequence omitted]

SEQ ID NO: 6722 - protein, 10 aa, synthetic construct
  REGION 1..10: note = necitumumab heavy chain CDR1
GGSISSGDYY

SEQ ID NO: 6723 - protein, 7 aa, synthetic construct
  REGION 1..7: note = necitumumab heavy chain CDR2
IYYSGST

SEQ ID NO: 6724 - protein, 13 aa, synthetic construct
  REGION 1..13: note = necitumumab heavy chain CDR3
ARVSIFGVGTFDY

SEQ ID NO: 6725 - protein, 107 aa, synthetic construct [sequence omitted]

SEQ ID NO: 6726 - protein, 6 aa, synthetic construct
  REGION 1..6: note = necitumumab light chain CDR1
QSVSSY

SEQ ID NO: 6727 - skipped

SEQ ID NO: 6728 - protein, 9 aa, synthetic construct
  REGION 1..9: note = necitumumab light chain CDR3
HQYGSTPLT

SEQ ID NO: 6729 - protein, 122 aa, synthetic construct
  REGION 1..122: note = nesvacumab heavy chain V region
EVQLVESGGGLVQPGGSLRLSCAASGFTFSSYDIHWVRQATGKGLEWVSAIGPAGDTYYPGSVKGRFTISRENAKNSLYLQMNSLRAGDTAVYYCARGLITFGGLIAPFDYWGQGTLVTVSS

SEQ ID NO: 6730 - protein, 7 aa, synthetic construct
  REGION 1..7: note = nesvacumab heavy chain CDR1
GFTFSSY

SEQ ID NO: 6731 - protein, 7 aa, synthetic construct
  REGION 1..7: note = nesvacumab heavy chain CDR2
IGPAGDT

SEQ ID NO: 6732 - protein, 16 aa, synthetic construct
  REGION 1..16: note = nesvacumab heavy chain CDR3
ARGLITFGGLIAPFDY

SEQ ID NO: 6733 - protein, 107 aa, synthetic construct
  REGION 1..107: note = nesvacumab light chain V region
EIVLTQSPGTLSLSPGERATLSCRASQSVSSTYLAWYQQKPGQAPRLLIYGASSRATGIPDRFSGSGSGTDFTLTISRLEPEDFAVYYCQHYDNSQTFGQGTKVEIK

SEQ ID NO: 6734 - protein, 6 aa, synthetic construct
  REGION 1..6: note = nesvacumab light chain CDR1
QSVSST

SEQ ID NO: 6735 - skipped

SEQ ID NO: 6736 - protein, 8 aa, synthetic construct
  REGION 1..8: note = nesvacumab light chain CDR3
QHYDNSQT

SEQ ID NO: 6737 - protein, 125 aa, synthetic construct
  REGION 1..125: note = netakimab heavy chain V region
QVQLVQSGGGLVQAGGSLRLSCAASGGTFATSPMGWLRQAPGKGTEFVAAISPSGGDRIYADSVKGRFTISRDNAGYFIYLQMNSLKPEDTAVYYCAVRRRFDGTSYYTGDYDSWGQGTLVTVSS

SEQ ID NO: 6738 - protein, 8 aa, synthetic construct
  REGION 1..8: note = netakimab heavy chain CDR1
GGTFATSP

SEQ ID NO: 6739 - protein, 7 aa, synthetic construct
  REGION 1..7: note = netakimab heavy chain CDR2
ISPSGGD

SEQ ID NO: 6740 - protein, 19 aa, synthetic construct
  REGION 1..19: note = netakimab heavy chain CDR3
CAVRRRFDGTSYYTGDYDS

SEQ ID NO: 6741 - protein, 108 aa, synthetic construct
  REGION 1..108: note = netakimab light chain V region
EIVLTQSPGTLSLSPGERATLSCRASQSVSSSYLAWYQQKPGQAPRLLIYDASSRATGIPDRFSGSGSGTDFTLTISRLEPEDFAVYYCQQYSYSPVTFGQGTKVEIK

SEQ ID NO: 6742 - protein, 7 aa, synthetic construct
  REGION 1..7: note = netakimab light chain CDR1
QSVSSSY

SEQ ID NO: 6743 - skipped

SEQ ID NO: 6744 - protein, 9 aa, synthetic construct
  REGION 1..9: note = netakimab light chain CDR3
QQYSYSPVT

SEQ ID NO: 6745 - protein, 116 aa, synthetic construct
  REGION 1..116: note = nipocalimab heavy chain V region
EVQLLESGGGLVQPGGSLRLSCAASGFTFSTYAMGWVRQAPGKGLEWVSSIGASGSQTRYADSVKGRFTISRDNSKNTLYLQMNSLRAEDTAVYYCARLAIGDSYWGQGTMVTVSS

SEQ ID NO: 6746 - protein, 7 aa, synthetic construct
  REGION 1..7: note = nipocalimab heavy chain CDR1
GFTFSTY

SEQ ID NO: 6747 - protein, 8 aa, synthetic construct
  REGION 1..8: note = nipocalimab heavy chain CDR2
IGASGSQT

SEQ ID NO: 6748 - protein, 9 aa, synthetic construct
  REGION 1..9: note = nipocalimab heavy chain CDR3
ARLAIGDSY

SEQ ID NO: 6749 - protein, 110 aa, synthetic construct
  REGION 1..110: note = nipocalimab light chain V region
QSALTQPASVSGSPGQSITISCTGTGSDVGSYNLVSWYQQHPGKAPKLMIYGDSERPSGVSNRFSGSKSGNTASLTISGLQAEDEADYYCSSYAGSGIYVFGTGTKVTVL

SEQ ID NO: 6750 - protein, 9 aa, synthetic construct
  REGION 1..9: note = nipocalimab light chain CDR1
GSDVGSYNL

SEQ ID NO: 6751 - skipped

SEQ ID NO: 6752 - protein, 10 aa, synthetic construct
  REGION 1..10: note = nipocalimab light chain CDR3
SSYAGSGIYV

SEQ ID NO: 6753 - protein, 113 aa, synthetic construct [sequence omitted]

SEQ ID NO: 6754 - protein, 8 aa, synthetic construct
  REGION 1..8: note = nivolumab heavy chain CDR1
GITFSNSG

SEQ ID NO: 6755 - protein, 8 aa, synthetic construct
  REGION 1..8: note = nivolumab heavy chain CDR2
IWYDGSKR

SEQ ID NO: 6756 - protein, 6 aa, synthetic construct
  REGION 1..6: note = nivolumab heavy chain CDR3
ATNDDY

SEQ ID NO: 6757 - protein, 107 aa, synthetic construct [sequence omitted]

SEQ ID NO: 6758 - protein, 6 aa, synthetic construct
  REGION 1..6: note = nivolumab light chain CDR1
QSVSSY

SEQ ID NO: 6759 - skipped

SEQ ID NO: 6760 - protein, 9 aa, synthetic construct
  REGION 1..9: note = nivolumab light chain CDR3
QQSSNWPRT

SEQ ID NO: 6761 - protein, 118 aa, synthetic construct
  REGION 1..118: note = nurulimab heavy chain V region
EVQLVESGGGVVQPGRSLRLSCAASGFTFSSYTMHWVRQAPGKGLEWVTFISYDGNNKYYADSVKGRFTISRDNSKNTLYLQMNSLRAEDTAIYYCARTGWLGPFDYWGQGTLVTVSS

SEQ ID NO: 6762 - protein, 7 aa, synthetic construct
  REGION 1..7: note = nurulimab heavy chain CDR1
GFTFSSY

SEQ ID NO: 6763 - protein, 8 aa, synthetic construct
  REGION 1..8: note = nurulimab heavy chain CDR2
ISYDGNNK

SEQ ID NO: 6764 - protein, 11 aa, synthetic construct
  REGION 1..11: note = nurulimab heavy chain CDR3
ARTGWLGPFDY

SEQ ID NO: 6765 - protein, 108 aa, synthetic construct; identical to SEQ ID NO: 6389
  REGION 1..108: note = nurulimab light chain V region

SEQ ID NO: 6766 - protein, 7 aa, synthetic construct
  REGION 1..7: note = nurulimab light chain CDR1
QSVGSSY

SEQ ID NO: 6767 - skipped

SEQ ID NO: 6768 - protein, 9 aa, synthetic construct
  REGION 1..9: note = nurulimab light chain CDR3
QQYGSSPWT

SEQ ID NO: 6769 - protein, 119 aa, synthetic construct
  REGION 1..119: note = obiltoxaximab heavy chain V region
QVQLQQSGPELKKPGASVKVSCKDSGYAFSSSWMNWVRQAPGQGLEWIGRIYPGDGDTNYNGKFQGRVTITADKSSSTAYMELSSLRSEDTAVYFCARSGLLRYAMDYWGQGTLVTVSS

SEQ ID NO: 6770 - protein, 8 aa, synthetic construct
  REGION 1..8: note = obiltoxaximab heavy chain CDR1
GYAFSSSW

SEQ ID NO: 6771 - protein, 8 aa, synthetic construct
  REGION 1..8: note = obiltoxaximab heavy chain CDR2
IYPGDGDT

SEQ ID NO: 6772 - protein, 12 aa, synthetic construct
  REGION 1..12: note = obiltoxaximab heavy chain CDR3
ARSGLLRYAMDY

SEQ ID NO: 6773 - protein, 107 aa, synthetic construct
  REGION 1..107: note = obiltoxaximab light chain V region
DIQMTQSPSSLSASVGDRVTITCRASQDIRNYLNWYQQKPGKAVKLLIYYTSRLLPGVPSRFSGSGSGTDYSLTISSQEQEDIGTYFCQQGNTLPWTFGQGTKVEIR

SEQ ID NO: 6774 - protein, 6 aa, synthetic construct
  REGION 1..6: note = obiltoxaximab light chain CDR1
QDIRNY

SEQ ID NO: 6775 - skipped

SEQ ID NO: 6776 - protein, 9 aa, synthetic construct
  REGION 1..9: note = obiltoxaximab light chain CDR3
QQGNTLPWT

SEQ ID NO: 6777 - protein, 119 aa, synthetic construct
  REGION 1..119: note = obinutuzumab heavy chain V region
QVQLVQSGAEVKKPGSSVKVSCKASGYAFSYSWINWVRQAPGQGLEWMGRIFPGDGDTDYNGKFKGRVTITADKSTSTAYMELSSLRSEDTAVYYCARNVFDGYWLVYWGQGTLVTVSS

SEQ ID NO: 6778 - protein, 8 aa, synthetic construct
  REGION 1..8: note = obinutuzumab heavy chain CDR1
GYAFSYSW

SEQ ID NO: 6779 - protein, 9 aa, synthetic construct
  REGION 1..9: note = obinutuzumab heavy chain CDR2
IFPGDGDTD

SEQ ID NO: 6780 - protein, 12 aa, synthetic construct
  REGION 1..12: note = obinutuzumab heavy chain CDR3
ARNVFDGYWLVY

SEQ ID NO: 6781 - protein, 112 aa, synthetic construct
  REGION 1..112: note = obinutuzumab light chain V region
DIVMTQTPLSLPVTPGEPASISCRSSKSLLHSNGITYLYWYLQKPGQSPQLLIYQMSNLVSGVPDRFSGSGSGTDFTLKISRVEAEDVGVYYCAQNLELPYTFGGGTKVEIK

SEQ ID NO: 6782 - protein, 11 aa, synthetic construct
  REGION 1..11: note = obinutuzumab light chain CDR1
KSLLHSNGITY

SEQ ID NO: 6783 - skipped

SEQ ID NO: 6784 - protein, 9 aa, synthetic construct
  REGION 1..9: note = obinutuzumab light chain CDR3
AQNLELPYT

SEQ ID NO: 6785 - protein, 118 aa, synthetic construct
  REGION 1..118: note = odesivimab heavy chain V region
EVQLVESGGGLVQPGGSLRLSCAASGFTFSSYDMHWVRQATGKGLEWVSAIGTAGDTYYPGSVKGRFTISRENAKNSLYLQMNSLRAGDTAVYYCARTWFGELYFDYWGQGTLVTVSS

SEQ ID NO: 6786 - protein, 7 aa, synthetic construct
  REGION 1..7: note = odesivimab heavy chain CDR1
GFTFSSY

SEQ ID NO: 6787 - protein, 7 aa, synthetic construct
  REGION 1..7: note = odesivimab heavy chain CDR2
IGTAGDT

SEQ ID NO: 6788 - protein, 12 aa, synthetic construct
  REGION 1..12: note = odesivimab heavy chain CDR3
ARTWFGELYFDY

SEQ ID NO: 6789 - protein, 113 aa, synthetic construct
  REGION 1..113: note = odesivimab light chain V region
DIVMTQSPDSLAVSLGERATINCKSSQSVLYSSNNKNYLAWYQQKPGQPPKLLIYWASTRESGVPDRFSGSGSGTEFTLTITSLQAEDVAVYYCQQYYSSPLTFGGGTKVEIK

SEQ ID NO: 6790 - protein, 12 aa, synthetic construct
  REGION 1..12: note = odesivimab light chain CDR1
QSVLYSSNNKNY

SEQ ID NO: 6791 - skipped

SEQ ID NO: 6792 - protein, 9 aa, synthetic construct
  REGION 1..9: note = odesivimab light chain CDR3
QQYYSSPLT

SEQ ID NO: 6793 - protein, 127 aa, synthetic construct
  REGION 1..127: note = olaratumab heavy chain V region
QLQLQESGPGLVKPSETLSLTCTVSGGSINSSSYYWGWLRQSPGKGLEWIGSFFYTGSTYYNPSLRSRLTISVDTSKNQFSLMLSSVTAADTAVYYCARQSTYYYGSGNYYGWFDRWDQGTLVTVSS

SEQ ID NO: 6794 - protein, 9 aa, synthetic construct
  REGION 1..9: note = olaratumab heavy chain CDR1
GSINSSSYY

SEQ ID NO: 6795 - protein, 7 aa, synthetic construct
  REGION 1..7: note = olaratumab heavy chain CDR2
FFYTGST

SEQ ID NO: 6796 - protein, 19 aa, synthetic construct
  REGION 1..19: note = olaratumab heavy chain CDR3
ARQSTYYYGSGNYYGWFDR

SEQ ID NO: 6797 - protein, 107 aa, synthetic construct
  REGION 1..107: note = olaratumab light chain V region
EIVLTQSPATLSLSPGERATLSCRASQSVSSYLAWYQQKPGQAPRLLIYDASNRATGIPARFSGSGSGTDFTLTISSLEPEDFAVYYCQQRSNWPPAFGQGTKVEIK

SEQ ID NO: 6798 - protein, 7 aa, synthetic construct
  REGION 1..7: note = olaratumab light chain CDR1
QSVSSYL

SEQ ID NO: 6799 - skipped

SEQ ID NO: 6800 - protein, 9 aa, synthetic construct
  REGION 1..9: note = olaratumab light chain CDR3
QQRSNWPPA

SEQ ID NO: 6801 - protein, 117 aa, synthetic construct
  REGION 1..117: note = oleclumab heavy chain V region
EVQLLESGGGLVQPGGSLRLSCAASGFTFSSYAYSWVRQAPGKGLEWVSAISGSGGRTYYADSVKGRFTISRDNSKNTLYLQMNSLRAEDTAVYYCARLGYGRVDEWGRGTLVTVSS

SEQ ID NO: 6802 - protein, 7 aa, synthetic construct
  REGION 1..7: note = oleclumab heavy chain CDR1
GFTFSSY

SEQ ID NO: 6803 - protein, 8 aa, synthetic construct
  REGION 1..8: note = oleclumab heavy chain CDR2
ISGSGGRT

SEQ ID NO: 6804 - protein, 10 aa, synthetic construct
  REGION 1..10: note = oleclumab heavy chain CDR3
ARLGYGRVDE

SEQ ID NO: 6805 - protein, 110 aa, synthetic construct
  REGION 1..110: note = oleclumab light chain V region
QSVLTQPPSASGTPGQRVTISCSGSLSNIGRNPVNWYQQLPGTAPKLLIYLDNLRLSGVPDRFSGSKSGTSASLAISGLQSEDEADYYCATWDDSHPGWTFGGGTKLTVL

SEQ ID NO: 6806 - protein, 8 aa, synthetic construct
  REGION 1..8: note = oleclumab light chain CDR1
LSNIGRNP

SEQ ID NO: 6807 - skipped

SEQ ID NO: 6808 - protein, 11 aa, synthetic construct
  REGION 1..11: note = oleclumab light chain CDR3
ATWDDSHPGWT

SEQ ID NO: 6809 - protein, 121 aa, synthetic construct [sequence omitted]

SEQ ID NO: 6810 - protein, 8 aa, synthetic construct
  REGION 1..8: note = omalizumab heavy chain CDR1
GYSITSGY

SEQ ID NO: 6811 - protein, 8 aa, synthetic construct
  REGION 1..8: note = omalizumab heavy chain CDR2
SITYDGST

SEQ ID NO: 6812 - protein, 14 aa, synthetic construct
  REGION 1..14: note = omalizumab heavy chain CDR3
ARGSHYFGHWHFAV

SEQ ID NO: 6813 - protein, 111 aa, synthetic construct [sequence omitted]

SEQ ID NO: 6814 - protein, 10 aa, synthetic construct
  REGION 1..10: note = omalizumab light chain CDR1
QSVDYDGDSY

SEQ ID NO: 6815 - skipped

SEQ ID NO: 6816 - protein, 9 aa, synthetic construct
  REGION 1..9: note = omalizumab light chain CDR3
QQSHEDPYT

SEQ ID NO: 6817 - protein, 118 aa, synthetic construct
  REGION 1..118: note = omburtamab heavy chain V region
QVQLQQSGAELVKPGASVKLSCKASGYTFTNYDINWVRQRPEQGLEWIGWIFPGDGSTQYNEKFKGKATLTTDTSSSTAYMQLSRLTSEDSAVYFCARQTTATWFAYWGQGTLVTVSA

SEQ ID NO: 6818 - protein, 8 aa, synthetic construct
  REGION 1..8: note = omburtamab heavy chain CDR1
GYTFTNYD

SEQ ID NO: 6819 - protein, 8 aa, synthetic construct
  REGION 1..8: note = omburtamab heavy chain CDR2
IFPGDGST

SEQ ID NO: 6820 - protein, 214 aa, synthetic construct
  REGION 1..214: note = omburtamab heavy chain CDR3
DIVMTQSPATLSVTPGDRVSLSCRASQSISDYLHWYQQKSHESPRLLIKYASQSISGIPSRFSGSGSGSDFTLSINSVEPEDVGVYYCQNGHSFPLTFGAGTKLELKRADAAPTVSIFPPSSEQLTSGGASVVCFLNNFYPKDINVKWKIDGSERQNGVLNSWTDQDSKDSTYSMSSTLTLTKDEYERHNSYTCEATHKTSTSPIVKSFNRNEC

SEQ ID NO: 6821 - protein, 107 aa, synthetic construct
  REGION 1..107: note = omburtamab light chain V region
DIVMTQSPATLSVTPGDRVSLSCRASQSISDYLHWYQQKSHESPRLLIKYASQSISGIPSRFSGSGSGSDFTLSINSVEPEDVGVYYCQNGHSFPLTFGAGTKLELK

SEQ ID NO: 6822 - protein, 6 aa, synthetic construct
  REGION 1..6: note = omburtamab light chain CDR1
QSISDY

SEQ ID NO: 6823 - skipped

SEQ ID NO: 6824 - protein, 9 aa, synthetic construct
  REGION 1..9: note = omburtamab light chain CDR3
QNGHSFPLT

SEQ ID NO: 6825 - protein, 125 aa, synthetic construct
  REGION 1..125: note = omodenbamab heavy chain V region
EVQLVESGGGLVQPGGSLRLSCAASGFTFSTYGMSWVRQAPGKGLEWVSSITGSGRSTFYADSVKGRFTISRDNSTNTLSLQMNSLRAEDTAVYYCARSPADIVTGYYPWWFDLWGQGTLVTVSS

SEQ ID NO: 6826 - protein, 8 aa, synthetic construct
  REGION 1..8: note = omodenbamab heavy chain CDR1
GFTFSTYG

SEQ ID NO: 6827 - protein, 8 aa, synthetic construct
  REGION 1..8: note = omodenbamab heavy chain CDR2
ITGSGRST

SEQ ID NO: 6828 - protein, 18 aa, synthetic construct
  REGION 1..18: note = omodenbamab heavy chain CDR3
ARSPADIVTGYYPWWFDL

SEQ ID NO: 6829 - protein, 107 aa, synthetic construct
  REGION 1..107: note = omodenbamab light chain V region
DIQMTQSPSSLSASIGDRVTITCRASQSINTYLNWYQQKPGKAPRLLIAGASSLQSGVPSRFSGSGSGTDFTLTISSLQPEDFATYYCQQANSFPLTFGQGTRLEIK

SEQ ID NO: 6830 - protein, 6 aa, synthetic construct
  REGION 1..6: note = omodenbamab light chain CDR1
QSINTY

SEQ ID NO: 6831 - skipped

SEQ ID NO: 6832 - protein, 9 aa, synthetic construct
  REGION 1..9: note = omodenbamab light chain CDR3
QQANSFPLT

SEQ ID NO: 6833 - protein, 116 aa, synthetic construct [sequence omitted]

SEQ ID NO: 6834 - protein, 8 aa, synthetic construct
  REGION 1..8: note = onfekafusp alfa heavy chain CDR1
GFTFSSFS

SEQ ID NO: 6835 - protein, 8 aa, synthetic construct
  REGION 1..8: note = onfekafusp alfa heavy chain CDR2
ISGSSGTT

SEQ ID NO: 6836 - protein, 9 aa, synthetic construct
  REGION 1..9: note = onfekafusp alfa heavy chain CDR3
AKPFPYFDY

SEQ ID NO: 6837 - protein, 108 aa, synthetic construct [sequence omitted]

SEQ ID NO: 6838 - protein, 7 aa, synthetic construct
  REGION 1..7: note = onfekafusp alfa light chain CDR1
QSVSSSF

SEQ ID NO: 6839 - skipped

SEQ ID NO: 6840 - protein, 9 aa, synthetic construct
  REGION 1..9: note = onfekafusp alfa light chain CDR3
QQTGRIPPT

SEQ ID NO: 6841 - protein, 124 aa, synthetic construct
  REGION 1..124: note = ontamalimab heavy chain V region
QVQLVQSGAEVKKPGASVKVSCKASGYTFTSYGINWVRQAPGQGLEWMGWISVYSGNTNYAQKVQGRVTMTADTSTSTAYMDLRSLRSDDTAVYYCAREGSSSSGDYYYGMDVWGQGTTVTVSS

SEQ ID NO: 6842 - protein, 8 aa, synthetic construct
  REGION 1..8: note = ontamalimab heavy chain CDR1
GYTFTSYG

SEQ ID NO: 6843 - protein, 8 aa, synthetic construct
  REGION 1..8: note = ontamalimab heavy chain CDR2
ISVYSGNT

SEQ ID NO: 6844 - protein, 17 aa, synthetic construct
  REGION 1..17: note = ontamalimab heavy chain CDR3
AREGSSSSGDYYYGMDV

SEQ ID NO: 6845 - protein, 112 aa, synthetic construct
  REGION 1..112: note = ontamalimab light chain V region
DIVMTQTPLSLSVTPGQPASISCKSSQSLLHTDGTTYLYWYLQKPGQPPQLLIYEVSNRFSGVPDRFSGSGSGTDFTLKISRVEAEDVGIYYCMQNIQLPWTFGQGTKVEIK

SEQ ID NO: 6846 - protein, 11 aa, synthetic construct
  REGION 1..11: note = ontamalimab light chain CDR1
QSLLHTDGTTY

SEQ ID NO: 6847 - skipped

SEQ ID NO: 6848 - protein, 9 aa, synthetic construct
  REGION 1..9: note = ontamalimab light chain CDR3
MQNIQLPWT

SEQ ID NO: 6849 - protein, 120 aa, synthetic construct
  REGION 1..120: note = onvatilimab heavy chain V region
QVQLVQSGAEVKKPGSSVKVSCKASGGTFSSYAISWVRQAPGQGLEWMGGIIPIFGTANYAQKFQGRVTITADESTSTAYMELSSLRSEDTAVYYCARSSYGWSYEFDYWGQGTLVTVSS

SEQ ID NO: 6850 - protein, 7 aa, synthetic construct
  REGION 1..7: note = onvatilimab heavy chain CDR1
GTFSSYA

SEQ ID NO: 6851 - protein, 8 aa, synthetic construct
  REGION 1..8: note = onvatilimab heavy chain CDR2
IIPIFGTA

SEQ ID NO: 6852 - protein, 13 aa, synthetic construct
  REGION 1..13: note = onvatilimab heavy chain CDR3
ARSSYGWSYEFDY

SEQ ID NO: 6853 - protein, 107 aa, synthetic construct
  REGION 1..107: note = onvatilimab light chain V region
DIQMTQSPSSLSASVGDRVTITCRASQSIDTRLNWYQQKPGKAPKLLIYSASSLQSGVPSRFSGSGSGTDFTLTISSLQPEDFATYYCQQSAYNPITFGQGTKVEIK

SEQ ID NO: 6854 - protein, 6 aa, synthetic construct
  REGION 1..6: note = onvatilimab light chain CDR1
QSIDTR

SEQ ID NO: 6855 - skipped

SEQ ID NO: 6856 - protein, 9 aa, synthetic construct
  REGION 1..9: note = onvatilimab light chain CDR3
QQSAYNPIT

SEQ ID NO: 6857 - protein, 118 aa, synthetic construct [sequence omitted]

SEQ ID NO: 6858 - protein, 8 aa, synthetic construct
  REGION 1..8: note = opicinumab heavy chain CDR1
GFTFSAYE

SEQ ID NO: 6859 - protein, 8 aa, synthetic construct
  REGION 1..8: note = opicinumab heavy chain CDR2
IGPSGGFT

SEQ ID NO: 6860 - protein, 11 aa, synthetic construct
  REGION 1..11: note = opicinumab heavy chain CDR3
ATEGDNDAFDI

SEQ ID NO: 6861 - protein, 108 aa, synthetic construct
  REGION 1..108: note = opicinumab light chain V region
DIQMTQSPATLSLSPGERATLSCRASQSVSSYLAWYQQKPGQAPRLLIYDASNRATGIPARFSGSGSGTDFTLTISSLEPEDFAVYYCQQRSNWPMYTFGQGTKLEIK

SEQ ID NO: 6862 - protein, 6 aa, synthetic construct
  REGION 1..6: note = opicinumab light chain CDR1
QSVSSY

SEQ ID NO: 6863 - skipped

SEQ ID NO: 6864 - protein, 10 aa, synthetic construct
  REGION 1..10: note = opicinumab light chain CDR3
QQRSNWPMYT

SEQ ID NO: 6865 - protein, 123 aa, synthetic construct
  REGION 1..123: note = opucolimab heavy chain V region
EVQLVQSGGGLVKPGGSLRLSCAASGFTFSSYTMNWVRQAPGKGLEWVSSISSGSDYLYYADSVKGRFTISRDNAKNSLYLQMNSLRAEDTAVYYCARNELRWYPQAGAFDRWGQGTMVTVSS

SEQ ID NO: 6866 - protein, 8 aa, synthetic construct
  REGION 1..8: note = opucolimab heavy chain CDR1
GFTFSSYT

SEQ ID NO: 6867 - protein, 8 aa, synthetic construct
  REGION 1..8: note = opucolimab heavy chain CDR2
ISSGSDYL

SEQ ID NO: 6868 - protein, 16 aa, synthetic construct
  REGION 1..16: note = opucolimab heavy chain CDR3
ARNELRWYPQAGAFDR

SEQ ID NO: 6869 - protein, 109 aa, synthetic construct
  REGION 1..109: note = opucolimab light chain V region
QSVVTQPPSMSAAPGQRVTISCSGSSSYIESSYVGWYQQLPGTAPRLLIYDDDMRPSGIPDRFSGSKSGTSATLAITGLQTGDEADYYCEIWRSGLGGVFGGGTKLTVL

SEQ ID NO: 6870 - protein, 9 aa, synthetic construct
  REGION 1..9: note = opucolimab light chain CDR1
SSYIESSYV

SEQ ID NO: 6871 - skipped

SEQ ID NO: 6872 - protein, 10 aa, synthetic construct
  REGION 1..10: note = opucolimab light chain CDR3
EIWRSGLGGV

SEQ ID NO: 6873 - protein, 118 aa, synthetic construct
  REGION 1..118: note = ordesekimab heavy chain V region
EVQLVQSGAEVKKPGESLKISCKVSGYFFTTYWIGWVRQMPGKGLEYMGIIYPGDSDTRYSPSFQGQVTISADKSISTAYLQWSSLKASDTAMYYCARGGNWNCFDYWGQGTLVTVSS

SEQ ID NO: 6874 - protein, 8 aa, synthetic construct
  REGION 1..8: note = ordesekimab heavy chain CDR1
GYFFTTYW

SEQ ID NO: 6875 - protein, 8 aa, synthetic construct
  REGION 1..8: note = ordesekimab heavy chain CDR2
IYPGDSDT

SEQ ID NO: 6876 - protein, 11 aa, synthetic construct
  REGION 1..11: note = ordesekimab heavy chain CDR3
ARGGNWNCFDY

SEQ ID NO: 6877 - protein, 106 aa, synthetic construct
  REGION 1..106: note = ordesekimab light chain V region
EIVLTQSPGTLSLSPGERATLSCRASQSVSSSYLAWYQQKPGQAPRLLIYGASRRATGIPDRFSGSGSGTDFTLTISRLEPEDFAVYYCQRYGSSHTFGQGTKLEI

SEQ ID NO: 6878 - protein, 7 aa, synthetic construct
  REGION 1..7: note = ordesekimab light chain CDR1
QSVSSSY

SEQ ID NO: 6879 - skipped

SEQ ID NO: 6880 - protein, 8 aa, synthetic construct
  REGION 1..8: note = ordesekimab light chain CDR3
QRYGSSHT

SEQ ID NO: 6881 - protein, 127 aa, synthetic construct
  REGION 1..127: note = ormutivimab heavy chain V region
QVQLVQSGAEVKKPGSSVKVSCKASGGTFNRYTVNWVRQAPGQGLEWMGGIIPIFGTANYAQRFQGRLTITADESTSTAYMELSSLRSDDTAVYFCARENLDNSGTYYYFSGWFDPWGQGTLVTVSS

SEQ ID NO: 6882 - protein, 8 aa, synthetic construct
  REGION 1..8: note = ormutivimab heavy chain CDR1
GGTFNRYT

SEQ ID NO: 6883 - protein, 8 aa, synthetic construct
  REGION 1..8: note = ormutivimab heavy chain CDR2
IIPIFGTA

SEQ ID NO: 6884 - protein, 20 aa, synthetic construct
  REGION 1..20: note = ormutivimab heavy chain CDR3
ARENLDNSGTYYYFSGWFDP

SEQ ID NO: 6885 - protein, 112 aa, synthetic construct
  REGION 1..112: note = ormutivimab light chain V region
QSALTQPRSVSGSPGQSVTISCTGTSSDIGGYNFVSWYQQHPGKAPKLMIYDATKRPSGVPDRFSGSKSGNTASLTISGLQAEDEADYYCCSYAGDYTPGVVFGGGTKLTVL

SEQ ID NO: 6886 - protein, 8 aa, synthetic construct
  REGION 1..8: note = ormutivimab light chain CDR1
SSDIGGYN

SEQ ID NO: 6887 - skipped

SEQ ID NO: 6888 - protein, 12 aa, synthetic construct
  REGION 1..12: note = ormutivimab light chain CDR3
CSYAGDYTPGVV

SEQ ID NO: 6889 - protein, 121 aa, synthetic construct
  REGION 1..121: note = orticumab heavy chain V region
EVQLLESGGGLVQPGGSLRLSCAASGFTFSNAWMSWVRQAPGKGLEWVSSISVGGHRTYYADSVKGRSTISRDNSKNTLYLQMNSLRAEDTAVYYCARIRVGPSGGAFDYWGQGTLVTVSS

SEQ ID NO: 6890 - protein, 8 aa, synthetic construct
  REGION 1..8: note = orticumab heavy chain CDR1
GFTFSNAW

SEQ ID NO: 6891 - protein, 8 aa, synthetic construct
  REGION 1..8: note = orticumab heavy chain CDR2
ISVGGHRT

SEQ ID NO: 6892 - protein, 14 aa, synthetic construct
  REGION 1..14: note = orticumab heavy chain CDR3
ARIRVGPSGGAFDY

SEQ ID NO: 6893 - protein, 110 aa, synthetic construct
  REGION 1..110: note = orticumab light chain V region
QSVLTQPPSASGTPGQRVTISCSGSNTNIGKNYVSWYQQLPGTAPKLLIYANSNRPSGVPDRFSGSKSGTSASLAISGLRSEDEADYYCASWDASLNGWVFGGGTKLTVL

SEQ ID NO: 6894 - protein, 8 aa, synthetic construct
  REGION 1..8: note = orticumab light chain CDR1
NTNIGKNY

SEQ ID NO: 6895 - skipped

SEQ ID NO: 6896 - protein, 7 aa, synthetic construct
  REGION 1..7: note = orticumab light chain CDR3
ASLNGWV

SEQ ID NO: 6897 - protein, 123 aa, synthetic construct
  REGION 1..123: note = orudokimab heavy chain V region
EVQLVETGGGLIQPGGSLRLSCAASGFTFSFYAMSWVRQAPGKGLEWVSAISGSGGSTYYADSVKGRFTISRDNSKNTLYLQMNSLRAEDTAVYYCARTIHGIRAAYDAFIIWGQGTLVTVSS

SEQ ID NO: 6898 - protein, 8 aa, synthetic construct
  REGION 1..8: note = orudokimab heavy chain CDR1
GFTFSFYA

SEQ ID NO: 6899 - protein, 8 aa, synthetic construct
  REGION 1..8: note = orudokimab heavy chain CDR2
ISGSGGST

SEQ ID NO: 6900 - protein, 16 aa, synthetic construct
  REGION 1..16: note = orudokimab heavy chain CDR3
ARTIHGIRAAYDAFII

SEQ ID NO: 6901 - protein, 108 aa, synthetic construct
  REGION 1..108: note = orudokimab light chain V region
EIVLTQSPGTLSLSPGERATLSCRASQSVGINLSWYQQKPGQAPRLLIYGASHRLTGIPDRFSGSGSGTDFTLTISRLEPEDFAVYYCHQYSQPPPFTFGGGTKVEIK

SEQ ID NO: 6902 - protein, 6 aa, synthetic construct
  REGION 1..6: note = orudokimab light chain CDR1
QSVGIN

SEQ ID NO: 6903 - skipped

SEQ ID NO: 6904 - protein, 10 aa, synthetic construct
  REGION 1..10: note = orudokimab light chain CDR3
HQYSQPPPFT

SEQ ID NO: 6905 - protein, 120 aa, synthetic construct
  REGION 1..120: note = osocimab heavy chain V region
EVQLLESGGGLVQPGGSLRLSCAASGFTFSQYGMDWVRQAPGKGLEWVSGIGPSGGSTVYADSVKGRFTISRDNSKNTLYLQMNSLRAEDTAVYYCTRGGPYYYYGMDVWGQGTTVTVSS

SEQ ID NO: 6906 - protein, 7 aa, synthetic construct
  REGION 1..7: note = osocimab heavy chain CDR1
GFTFSQY

SEQ ID NO: 6907 - protein, 9 aa, synthetic construct
  REGION 1..9: note = osocimab heavy chain CDR2
IGPSGGSTV

SEQ ID NO: 6908 - protein, 13 aa, synthetic construct
  REGION 1..13: note = osocimab heavy chain CDR3
TRGGPYYYYGMDV

SEQ ID NO: 6909 - protein, 107 aa, synthetic construct
  REGION 1..107: note = osocimab light chain V region
DIQMTQSPSSLSASVGDRVTITCQASQDISNYLNWYQQKPGKAPKLLIYDASNLETGVPSRFSGSGSGTDFTFTISSLQPEDIATYYCQQADSFPVTFGGGTKVEIK

SEQ ID NO: 6910 - protein, 6 aa, synthetic construct
  REGION 1..6: note = osocimab light chain CDR1
QDISNY

SEQ ID NO: 6911 - skipped

SEQ ID NO: 6912 - protein, 9 aa, synthetic construct
  REGION 1..9: note = osocimab light chain CDR3
QQADSFPVT

SEQ ID NO: 6913 - protein, 117 aa, synthetic construct [sequence omitted]

SEQ ID NO: 6914 - protein, 7 aa, synthetic construct
  REGION 1..7: note = otilimab heavy chain CDR1
GFTFSSY

SEQ ID NO: 6915 - protein, 10 aa, synthetic construct
  REGION 1..10: note = otilimab heavy chain CDR2
IENKYAGGAT

SEQ ID NO: 6916 - protein, 8 aa, synthetic construct
  REGION 1..8: note = otilimab heavy chain CDR3
ARGFGTDF

SEQ ID NO: 6917 - protein, 104 aa, synthetic construct [sequence omitted]

SEQ ID NO: 6918 - protein, 6 aa, synthetic construct
  REGION 1..6: note = otilimab light chain CDR1
SIGKKY

SEQ ID NO: 6919 - skipped

SEQ ID NO: 6920 - protein, 9 aa, synthetic construct
  REGION 1..9: note = otilimab light chain CDR3
SAWGDKGMV

SEQ ID NO: 6921 - protein, 120 aa, synthetic construct
  REGION 1..120: note = oxelumab heavy chain V region
EVQLLESGGGLVQPGGSLRLSCAASGFTFNSYAMSWVRQAPGKGLEWVSIISGSGGFTYYADSVKGRFTISRDNSRTTLYLQMNSLRAEDTAVYYCAKDRLVAPGTFDYWGQGALVTVSS

SEQ ID NO: 6922 - protein, 8 aa, synthetic construct
  REGION 1..8: note = oxelumab heavy chain CDR1
GFTFNSYA

SEQ ID NO: 6923 - protein, 8 aa, synthetic construct
  REGION 1..8: note = oxelumab heavy chain CDR2
ISGSGGFT

SEQ ID NO: 6924 - protein, 13 aa, synthetic construct
  REGION 1..13: note = oxelumab heavy chain CDR3
AKDRLVAPGTFDY

SEQ ID NO: 6925 - protein, 107 aa, synthetic construct
  REGION 1..107: note = oxelumab light chain V region
DIQMTQSPSSLSASVGDRVTITCRASQGISSWLAWYQQKPEKAPKSLIYAASSLQSGVPSRFSGSGSGTDFTLTISSLQPEDFATYYCQQYNSYPYTFGQGTKLEIK

SEQ ID NO: 6926 - protein, 6 aa, synthetic construct
  REGION 1..6: note = oxelumab light chain CDR1
QGISSW

SEQ ID NO: 6927 - skipped

SEQ ID NO: 6928 - protein, 9 aa, synthetic construct
  REGION 1..9: note = oxelumab light chain CDR3
QQYNSYPYT

SEQ ID NO: 6929 - protein, 116 aa, synthetic construct
  REGION 1..116: note = pacmilimab heavy chain V region
EVQLLESGGGLVQPGGSLRLSCAASGFTFSSYAMSWVRQAPGKGLEWVSSIWRNGIVTVYADSVKGRFTISRDNSKNTLYLQMNSLRAEDTAVYYCAKWSAAFDYWGQGTLVTVSS

SEQ ID NO: 6930 - protein, 8 aa, synthetic construct
  REGION 1..8: note = pacmilimab heavy chain CDR1
GFTFSSYA

SEQ ID NO: 6931 - protein, 8 aa, synthetic construct
  REGION 1..8: note = pacmilimab heavy chain CDR2
IWRNGIVT

SEQ ID NO: 6932 - protein, 9 aa, synthetic construct
  REGION 1..9: note = pacmilimab heavy chain CDR3
AKWSAAFDY

SEQ ID NO: 6933 - protein, 157 aa, synthetic construct
  REGION 1..157: note = pacmilimab light chain V region
QGQSGSGIALCPSHFCQLPQTGGGSSGGSGGSGGISSGLLSGRSDNHGGSDIQMTQSPSSLSASVGDRVTITCRASQSISSYLNWYQQKPGKAPKLLIYAASSLQSGVPSRFSGSGSGTDFTLTISSLQPEDFATYYCQQDNGYPSTFGGGTKVEIK

SEQ ID NO: 6934 - protein, 6 aa, synthetic construct
  REGION 1..6: note = pacmilimab light chain CDR1
QSISSY

SEQ ID NO: 6935 - skipped

SEQ ID NO: 6936 - protein, 9 aa, synthetic construct
  REGION 1..9: note = pacmilimab light chain CDR3
QQDNGYPST

SEQ ID NO: 6937 - protein, 120 aa, synthetic construct
  REGION 1..120: note = pamrevlumab heavy chain V region
EGQLVQSGGGLVHPGGSLRLSCAGSGFTFSSYGMHWVRQAPGKGLEWVSGIGTGGGTYSTDSVKGRFTISRDNAKNSLYLQMNSLRAEDMAVYYCARGDYYGSGSFFDCWGQGTLVTVSS

SEQ ID NO: 6938 - protein, 7 aa, synthetic construct
  REGION 1..7: note = pamrevlumab heavy chain CDR1
GFTFSSY

SEQ ID NO: 6939 - protein, 10 aa, synthetic construct
  REGION 1..10: note = pamrevlumab heavy chain CDR2
IGTGGGTYST

SEQ ID NO: 6940 - protein, 14 aa, synthetic construct
  REGION 1..14: note = pamrevlumab heavy chain CDR3
ARGDYYGSGSFFDC

SEQ ID NO: 6941 - protein, 107 aa, synthetic construct
  REGION 1..107: note = pamrevlumab light chain V region
DIQMTQSPSSLSASVGDRVTITCRASQGISSWLAWYQQKPEKAPKSLIYAASSLQSGVPSRFSGSGSGTDFTLTISSLQPEDFATYYCQQYNSYPPTFGQGTKLEIK

SEQ ID NO: 6942 - protein, 6 aa, synthetic construct
  REGION 1..6: note = pamrevlumab light chain CDR1
QGISSW

SEQ ID NO: 6943 - skipped

SEQ ID NO: 6944 - protein, 9 aa, synthetic construct
  REGION 1..9: note = pamrevlumab light chain CDR3
QQYNSYPPT

SEQ ID NO: 6945 - protein, 116 aa, synthetic construct
  REGION 1..116: note = panobacumab heavy chain V region
EEQVVESGGGFVQPGGSLRLSCAASGFTFSPYWMHWVRQAPGKGLVWVSRINSDGSTYYADSVKGRFTISRDNARNTLYLQMNSLRAEDTAVYYCARDRYYGPEMWGQGTMVTVSS

SEQ ID NO: 6946 - protein, 9 aa, synthetic construct
  REGION 1..9: note = panobacumab heavy chain CDR1
GFTFSPYWM

SEQ ID NO: 6947 - protein, 7 aa, synthetic construct
  REGION 1..7: note = panobacumab heavy chain CDR2
INSDGST

SEQ ID NO: 6948 - protein, 10 aa, synthetic construct
  REGION 1..10: note = panobacumab heavy chain CDR3
ARDRYYGPEM

SEQ ID NO: 6949 - protein, 112 aa, synthetic construct
  REGION 1..112: note = panobacumab light chain V region
DVVMTQSPLSLPVTLGQPASISCRSSQSLVYSDGNTYLNWFQQRPGQSPRRLIYKVSNRDSGVPDRFSGSGSGTDFTLKISRVEAEDVGVYYCMQGTHWPLTFGGGTKVEIK

SEQ ID NO: 6950 - protein, 11 aa, synthetic construct
  REGION 1..11: note = panobacumab light chain CDR1
QSLVYSDGNTY

SEQ ID NO: 6951 - skipped

SEQ ID NO: 6952 - protein, 9 aa, synthetic construct
  REGION 1..9: note = panobacumab light chain CDR3
MQGTHWPLT

SEQ ID NO: 6953 - protein, 117 aa, synthetic construct [sequence omitted]

SEQ ID NO: 6954 - protein, 8 aa, synthetic construct
  REGION 1..8: note = patritumab heavy chain CDR1
GGSFSGYY

SEQ ID NO: 6955 - protein, 7 aa, synthetic construct
  REGION 1..7: note = patritumab heavy chain CDR2
INHSGST

SEQ ID NO: 6956 - protein, 11 aa, synthetic construct
  REGION 1..11: note = patritumab heavy chain CDR3
ARDKWTWYFDL

SEQ ID NO: 6957 - protein, 113 aa, synthetic construct [sequence omitted]

SEQ ID NO: 6958 - protein, 12 aa, synthetic construct
  REGION 1..12: note = patritumab light chain CDR1
QSVLYSSSNRNY

SEQ ID NO: 6959 - skipped

SEQ ID NO: 6960 - protein, 9 aa, synthetic construct
  REGION 1..9: note = patritumab light chain CDR3
QQYYSTPRT

SEQ ID NO: 6961 - protein, 117 aa, synthetic construct [sequence omitted]

SEQ ID NO: 6962 - protein, 8 aa, synthetic construct
  REGION 1..8: note = patritumab deruxtecan heavy chain CDR1
GGSFSGYY

SEQ ID NO: 6963 - protein, 7 aa, synthetic construct
  REGION 1..7: note = patritumab deruxtecan heavy chain CDR2
INHSGST

SEQ ID NO: 6964 - protein, 11 aa, synthetic construct
  REGION 1..11: note = patritumab deruxtecan heavy chain CDR3
ARDKWTWYFDL

SEQ ID NO: 6965 - protein, 113 aa, synthetic construct [sequence omitted]

SEQ ID NO: 6966 - protein, 12 aa, synthetic construct
  REGION 1..12: note = patritumab deruxtecan light chain CDR1
QSVLYSSSNRNY

SEQ ID NO: 6967 - skipped

SEQ ID NO: 6968 - protein, 9 aa, synthetic construct
  REGION 1..9: note = patritumab deruxtecan light chain CDR3
QQYYSTPRT

SEQ ID NO: 6969 - protein, 123 aa, synthetic construct
  REGION 1..123: note = pelgifatamab corixetan heavy chain V region
QVQLVESGGGVVQPGRSLRLSCAASGFAFSRYGMHWVRQAPGKGLEWVAVIWYDGSNKYYADSVKGRFTISRDNSKNTQYLQMNSLRAEDTAVYYCARGGDFLYYYYYGMDVWGQGTTVTVSS

SEQ ID NO: 6970 - protein, 7 aa, synthetic construct
  REGION 1..7: note = pelgifatamab corixetan heavy chain CDR1
GFAFSRY

SEQ ID NO: 6971 - protein, 8 aa, synthetic construct
  REGION 1..8: note = pelgifatamab corixetan heavy chain CDR2
IWYDGSNK

SEQ ID NO: 6972 - protein, 16 aa, synthetic construct
  REGION 1..16: note = pelgifatamab corixetan heavy chain CDR3
ARGGDFLYYYYYGMDV

SEQ ID NO: 6973 - protein, 107 aa, synthetic construct
  REGION 1..107: note = pelgifatamab corixetan light chain V region
DIQMTQSPSSLSASVGDRVTITCRASQGISNYLAWYQQKTGKVPKFLIYEASTLQSGVPSRFSGGGSGTDFTLTISSLQPEDVATYYCQNYNSAPFTFGPGTKVDIK

SEQ ID NO: 6974 - protein, 6 aa, synthetic construct
  REGION 1..6: note = pelgifatamab corixetan light chain CDR1
QGISNY

SEQ ID NO: 6975 - skipped

SEQ ID NO: 6976 - protein, 9 aa, synthetic construct
  REGION 1..9: note = pelgifatamab corixetan light chain CDR3
QNYNSAPFT

SEQ ID NO: 6977 - protein, 120 aa, synthetic construct [sequence omitted]

SEQ ID NO: 6978 - protein, 8 aa, synthetic construct
  REGION 1..8: note = pembrolizumab heavy chain CDR1
GYTFTNYY

SEQ ID NO: 6979 - protein, 8 aa, synthetic construct
  REGION 1..8: note = pembrolizumab heavy chain CDR2
INPSNGGT

SEQ ID NO: 6980 - protein, 13 aa, synthetic construct
  REGION 1..13: note = pembrolizumab heavy chain CDR3
ARRDYRFDMGFDY

SEQ ID NO: 6981 - protein, 111 aa, synthetic construct [sequence omitted]

SEQ ID NO: 6982 - protein, 10 aa, synthetic construct
  REGION 1..10: note = pembrolizumab light chain CDR1
KGVSTSGYSY

SEQ ID NO: 6983 - skipped

SEQ ID NO: 6984 - protein, 9 aa, synthetic construct
  REGION 1..9: note = pembrolizumab light chain CDR3
QHSRDLPLT

SEQ ID NO: 6985 - protein, 119 aa, synthetic construct [sequence omitted]

SEQ ID NO: 6986 - protein, 8 aa, synthetic construct
  REGION 1..8: note = pertuzumab heavy chain CDR1
GFTFTDYT

SEQ ID NO: 6987 - protein, 8 aa, synthetic construct
  REGION 1..8: note = pertuzumab heavy chain CDR2
VNPNSGGS

SEQ ID NO: 6988 - protein, 12 aa, synthetic construct
  REGION 1..12: note = pertuzumab heavy chain CDR3
ARNLGPSFYFDY

SEQ ID NO: 6989 - protein, 107 aa, synthetic construct [sequence omitted]

SEQ ID NO: 6990 - protein, 6 aa, synthetic construct
  REGION 1..6: note = pertuzumab light chain CDR1
QDVSIG

SEQ ID NO: 6991 - skipped

SEQ ID NO: 6992 - protein, 9 aa, synthetic construct
  REGION 1..9: note = pertuzumab light chain CDR3
QQYYIYPYT

SEQ ID NO: 6993 - protein, 120 aa, synthetic construct
  REGION 1..120: note = petosemtamab heavy chain V region
QVQLVQSGSELKKPGASVKISCKASGYDFTNYAMNWVRQAPGHGLEWMGWINANTGDPTYAQGFTGRFVFSLDTSVSTAYLQISSLKAEDSAVYYCTRERFLEWLHFDYWGQGTLVTVSS

SEQ ID NO: 6994 - protein, 8 aa, synthetic construct
  REGION 1..8: note = petosemtamab heavy chain CDR1
GYDFTNYA

SEQ ID NO: 6995 - protein, 8 aa, synthetic construct
  REGION 1..8: note = petosemtamab heavy chain CDR2
INANTGDP

SEQ ID NO: 6996 - protein, 13 aa, synthetic construct
  REGION 1..13: note = petosemtamab heavy chain CDR3
TRERFLEWLHFDY

SEQ ID NO: 6997 - protein, 107 aa, synthetic construct
  REGION 1..107: note = petosemtamab light chain V region
DIQMTQSPSSLSASVGDRVTITCRASQSISSYLNWYQQKPGKAPKLLIYAASSLQSGVPSRFSGSGSGTDFTLTISSLQPEDFATYYCQQSYSTPPTFGQGTKVEIK

SEQ ID NO: 6998 - protein, 6 aa, synthetic construct
  REGION 1..6: note = petosemtamab light chain CDR1
QSISSY

SEQ ID NO: 6999 - skipped

SEQ ID NO: 7000 - protein, 9 aa, synthetic construct
  REGION 1..9: note = petosemtamab light chain CDR3
QQSYSTPPT

SEQ ID NO: 7001 - protein, 118 aa, synthetic construct
  REGION 1..118: note = pimivalimab heavy chain V region
QVQLVQSGAEVKKPGASVKVSCKASGYTFPSYYMHWVRQAPGQGLEWMGIINPEGGSTAYAQKFQGRVTMTRDTSTSTVYMELSSLRSEDTAVYYCARGGTYYDYTYWGQGTLVTVSS

SEQ ID NO: 7002 - protein, 8 aa, synthetic construct
  REGION 1..8: note = pimivalimab heavy chain CDR1
GYTFPSYY

SEQ ID NO: 7003 - protein, 8 aa, synthetic construct
  REGION 1..8: note = pimivalimab heavy chain CDR2
INPEGGST

SEQ ID NO: 7004 - protein, 11 aa, synthetic construct
  REGION 1..11: note = pimivalimab heavy chain CDR3
ARGGTYYDYTY

SEQ ID NO: 7005 - protein, 107 aa, synthetic construct
  REGION 1..107: note = pimivalimab light chain V region
DIQMTQSPSTLSASVGDRVTITCRASQSISSWLAWYQQKPGKAPKLLIYEASSLESGVPSRFSGSGSGTEFTLTISSLQPDDFATYYCQQYNSFPPTFGGGTKVEIK

SEQ ID NO: 7006 - protein, 6 aa, synthetic construct
  REGION 1..6: note = pimivalimab light chain CDR1
QSISSW

SEQ ID NO: 7007 - skipped

SEQ ID NO: 7008 - protein, 9 aa, synthetic construct
  REGION 1..9: note = pimivalimab light chain CDR3
QQYNSFPPT

SEQ ID NO: 7009 - protein, 117 aa, synthetic construct [sequence omitted]

SEQ ID NO: 7010 - protein, 8 aa, synthetic construct
  REGION 1..8: note = polatuzumab vedotin heavy chain CDR1
GYTFSSYW

SEQ ID NO: 7011 - protein, 8 aa, synthetic construct
  REGION 1..8: note = polatuzumab vedotin heavy chain CDR2
ILPGGGDT

SEQ ID NO: 7012 - protein, 10 aa, synthetic construct
  REGION 1..10: note = polatuzumab vedotin heavy chain CDR3
TRRVPIRLDY

SEQ ID NO: 7013 - protein, 111 aa, synthetic construct [sequence omitted]

SEQ ID NO: 7014 - protein, 10 aa, synthetic construct
  REGION 1..10: note = polatuzumab vedotin light chain CDR1
QSVDYEGDSF

SEQ ID NO: 7015 - skipped

SEQ ID NO: 7016 - protein, 9 aa, synthetic construct
  REGION 1..9: note = polatuzumab vedotin light chain CDR3
QQSNEDPLT

SEQ ID NO: 7017 - protein, 120 aa, synthetic construct
  REGION 1..120: note = ponsegromab heavy chain V region
QVQLVQSGAEVKKPGSSVKVSCKASGYTFSSYNIDWVRQAPGQGLEWMGGINPIFGTAFYNQKFQGRVTITADESTSTAYMELSSLRSEDTAVYYCAREAITTVGAMDHWGQGTLVTVSS

SEQ ID NO: 7018 - protein, 7 aa, synthetic construct
  REGION 1..7: note = ponsegromab heavy chain CDR1
GYTFSSY

SEQ ID NO: 7019 - protein, 8 aa, synthetic construct
  REGION 1..8: note = ponsegromab heavy chain CDR2
INPIFGTA

SEQ ID NO: 7020 - protein, 13 aa, synthetic construct
  REGION 1..13: note = ponsegromab heavy chain CDR3
AREAITTVGAMDH

SEQ ID NO: 7021 - protein, 107 aa, synthetic construct
  REGION 1..107: note = ponsegromab light chain V region
EIVLTQSPATLSLSPGERATLSCRTSQSVHNYLAWYQQKPGQAPRLLIYDASTRADGIPARFSGSGSGTDFTLTISSLEPEDFAVYYCQQFWSWPWTFGQGTKVEIK

SEQ ID NO: 7022 - protein, 6 aa, synthetic construct
  REGION 1..6: note = ponsegromab light chain CDR1
QSVHNY

SEQ ID NO: 7023 - skipped

SEQ ID NO: 7024 - protein, 9 aa, synthetic construct
  REGION 1..9: note = ponsegromab light chain CDR3
QQFWSWPWT

SEQ ID NO: 7025 - protein, 120 aa, synthetic construct
  REGION 1..120: note = pozelimab heavy chain V region
QVQLQESGPGLVKPSETLSLTCTVSGDSVSSSYWTWIRQPPGKGLEWIGYIYYSGSSNYNPSLKSRATISVDTSKNQFSLKLSSVTAADTAVYYCAREGNVDTTMIFDYWGQGTLVTVSS

SEQ ID NO: 7026 - protein, 8 aa, synthetic construct
  REGION 1..8: note = pozelimab heavy chain CDR1
GDSVSSSY

SEQ ID NO: 7027 - protein, 7 aa, synthetic construct
  REGION 1..7: note = pozelimab heavy chain CDR2
IYYSGSS

SEQ ID NO: 7028 - protein, 14 aa, synthetic construct
  REGION 1..14: note = pozelimab heavy chain CDR3
AREGNVDTTMIFDY

SEQ ID NO: 7029 - protein, 107 aa, synthetic construct
  REGION 1..107: note = pozelimab light chain V region
AIQMTQSPSSLSASVGDRVTITCRASQGIRNDLGWYQQKPGKAPKLLIYAASSLQSGVPSRFAGRGSGTDFTLTISSLQPEDFATYYCLQDFNYPWTFGQGTKVEIK

SEQ ID NO: 7030 - protein, 6 aa, synthetic construct
  REGION 1..6: note = pozelimab light chain CDR1
QGIRND

SEQ ID NO: 7031 - skipped

SEQ ID NO: 7032 - protein, 9 aa, synthetic construct
  REGION 1..9: note = pozelimab light chain CDR3
LQDFNYPWT

SEQ ID NO: 7033 - protein, 121 aa, synthetic construct
  REGION 1..121: note = prezalumab heavy chain V region
EVQLVESGGGLVQPGGSLRLSCAASGFTFSSYWMSWVRQAPGKGLEWVAYIKQDGNEKYYVDSVKGRFTISRDNAKNSLYLQMNSLRAEDTAVYYCAREGILWFGDLPTFWGQGTLVTVSS

SEQ ID NO: 7034 - protein, 7 aa, synthetic construct
  REGION 1..7: note = prezalumab heavy chain CDR1
GFTFSSY

SEQ ID NO: 7035 - protein, 8 aa, synthetic construct
  REGION 1..8: note = prezalumab heavy chain CDR2
IKQDGNEK

SEQ ID NO: 7036 - protein, 14 aa, synthetic construct
  REGION 1..14: note = prezalumab heavy chain CDR3
AREGILWFGDLPTF

SEQ ID NO: 7037 - protein, 107 aa, synthetic construct
  REGION 1..107: note = prezalumab light chain V region
DIQMTQSPSSLSASVGDRVTITCRASQGISNWLAWYQQKPEKAPKSLIYAASSLQSGVPSRFSGSGSGTDFTLTISSLQPEDFATYYCQQYDSYPRTFGQGTKVEIK

SEQ ID NO: 7038 - protein, 6 aa, synthetic construct
  REGION 1..6: note = prezalumab light chain CDR1
QGISNW

SEQ ID NO: 7039 - skipped

SEQ ID NO: 7040 - protein, 9 aa, synthetic construct
  REGION 1..9: note = prezalumab light chain CDR3
QQYDSYPRT

SEQ ID NO: 7041 - protein, 129 aa, synthetic construct
  REGION 1..129: note = prolgolimab heavy chain V region
QVQLVQSGGGLVQPGGSLRLSCAASGFTFSSYWMYWVRQVPGKGLEWVSAIDTGGGRTYYADSVKGRFAISRVNAKNTMYLQMNSLRAEDTAVYYCARDEGGGTGWGVLKDWPYGLDAWGQGTLVTVSS

SEQ ID NO: 7042 - protein, 7 aa, synthetic construct
  REGION 1..7: note = prolgolimab heavy chain CDR1
GFTFSSY

SEQ ID NO: 7043 - protein, 8 aa, synthetic construct
  REGION 1..8: note = prolgolimab heavy chain CDR2
IDTGGGRT

SEQ ID NO: 7044 - protein, 22 aa, synthetic construct
  REGION 1..22: note = prolgolimab heavy chain CDR3
ARDEGGGTGWGVLKDWPYGLDA

SEQ ID NO: 7045 - protein, 106 aa, synthetic construct
  REGION 1..106: note = prolgolimab light chain V region
QPVLTQPLSVSVALGQTARITCGGNNIGSKNVHWYQQKPGQAPVLVIYRDSNRPSGIPERFSGSNSGNTATLTISRAQAGDEADYYCQVWDSSTAVFGTGTKLTVL

SEQ ID NO: 7046 - protein, 6 aa, synthetic construct
  REGION 1..6: note = prolgolimab light chain CDR1
NIGSKN

SEQ ID NO: 7047 - skipped

SEQ ID NO: 7048 - protein, 9 aa, synthetic construct
  REGION 1..9: note = prolgolimab light chain CDR3
QVWDSSTAV

SEQ ID NO: 7049 - protein, 116 aa, synthetic construct [sequence omitted]

SEQ ID NO: 7050 - protein, 8 aa, synthetic construct
  REGION 1..8: note = pulocimab heavy chain CDR1
GFTFSSYS

SEQ ID NO: 7051 - protein, 8 aa, synthetic construct
  REGION 1..8: note = pulocimab heavy chain CDR2
ISSSSSYI

SEQ ID NO: 7052 - protein, 9 aa, synthetic construct
  REGION 1..9: note = pulocimab heavy chain CDR3
ARVTDAFDI

SEQ ID NO: 7053 - protein, 107 aa, synthetic construct
  REGION 1..107: note = pulocimab light chain V region
DIQMTQSPSSVSASIGDRVTITCRASQGLDNWLGWYQQKPGKAPKLLIYDASNLDTGVPSRFSGSGSGTYFTLTISSLQAEDFAVYFCQQAKAFPPTFGGGTKVDIK

SEQ ID NO: 7054 - protein, 6 aa, synthetic construct
  REGION 1..6: note = pulocimab light chain CDR1
QGLDNW

SEQ ID NO: 7055 - skipped

SEQ ID NO: 7056 - protein, 9 aa, synthetic construct
  REGION 1..9: note = pulocimab light chain CDR3
QQAKAFPPT

SEQ ID NO: 7057 - protein, 122 aa, synthetic construct
  REGION 1..122: note = quisovalimab heavy chain V region
QVQLQQWGAGLLKPSETLSLTCAVYGGSFSGYNWHWIRQPPGKGLEWIGEITHSGSTNYNPSLKSRVTISVDTSKNQFSLKLSSVTAADTAVYYCVREIAVAGTGYYGMDVWGQGTTVTVSS

SEQ ID NO: 7058 - protein, 8 aa, synthetic construct
  REGION 1..8: note = quisovalimab heavy chain CDR1
GGSFSGYN

SEQ ID NO: 7059 - protein, 7 aa, synthetic construct
  REGION 1..7: note = quisovalimab heavy chain CDR2
ITHSGST

SEQ ID NO: 7060 - protein, 16 aa, synthetic construct
  REGION 1..16: note = quisovalimab heavy chain CDR3
VREIAVAGTGYYGMDV

SEQ ID NO: 7061 - protein, 107 aa, synthetic construct
  REGION 1..107: note = quisovalimab light chain V region
AIQLTQSPSSLSASVGDRVTITCRASQGINSAFAWYQQKPGKAPKLLIYDASSLESGVPSRFSGSGSGTDFTLTISSLQPEDFATYYCQQFNSYPLTFGGGTKVEIK

SEQ ID NO: 7062 - protein, 6 aa, synthetic construct
  REGION 1..6: note = quisovalimab light chain CDR1
QGINSA

SEQ ID NO: 7063 - skipped

SEQ ID NO: 7064 - protein, 9 aa, synthetic construct
  REGION 1..9: note = quisovalimab light chain CDR3
QQFNSYPLT

SEQ ID NO: 7065 - protein, 121 aa, synthetic construct
  REGION 1..121: note = racotumomab heavy chain V region
QVQLQQSGAELVKPGASVKLSCKASGYTFTSYDINWVRQRPEQGLEWIGWIFPGDGSTKYNEKFKGKATLTTDKSSSTAYMQLSRLTSEDSAVYFCAREDYYDNSYYFDYWGQGTTLTVSS

SEQ ID NO: 7066 - protein, 8 aa, synthetic construct
  REGION 1..8: note = racotumomab heavy chain CDR1
GYTFTSYD

SEQ ID NO: 7067 - protein, 8 aa, synthetic construct
  REGION 1..8: note = racotumomab heavy chain CDR2
IFPGDGST

SEQ ID NO: 7068 - protein, 14 aa, synthetic construct
  REGION 1..14: note = racotumomab heavy chain CDR3
AREDYYDNSYYFDY

SEQ ID NO: 7069 - protein, 107 aa, synthetic construct
  REGION 1..107: note = racotumomab light chain V region
DIQMTQTTSSLSASLGDRVTISCRASQDISNYLNWYQQKPDGTVKLLIYYTSRLHSGVPSRFSGSGSGTDYSLTISNLEQEDIATYFCQQGNTLPWTFGGGTKLEIK

SEQ ID NO: 7070 - protein, 6 aa, synthetic construct
  REGION 1..6: note = racotumomab light chain CDR1
QDISNY

SEQ ID NO: 7071 - skipped

SEQ ID NO: 7072 - protein, 9 aa, synthetic construct
  REGION 1..9: note = racotumomab light chain CDR3
QQGNTLPWT

SEQ ID NO: 7073 - protein, 116 aa, synthetic construct [sequence omitted]

SEQ ID NO: 7074 - protein, 8 aa, synthetic construct
  REGION 1..8: note = radretumab heavy chain CDR1
GFTFSSFS

SEQ ID NO: 7075 - protein, 8 aa, synthetic construct
  REGION 1..8: note = radretumab heavy chain CDR2
ISGSSGTT

SEQ ID NO: 7076 - protein, 9 aa, synthetic construct
  REGION 1..9: note = radretumab heavy chain CDR3
AKPFPYFDY

SEQ ID NO: 7077 - protein, 108 aa, synthetic construct [sequence omitted]

SEQ ID NO: 7078 - protein, 7 aa, synthetic construct
  REGION 1..7: note = radretumab light chain CDR1
QSVSSSF

SEQ ID NO: 7079 - skipped

SEQ ID NO: 7080 - protein, 9 aa, synthetic construct
  REGION 1..9: note = radretumab light chain CDR3
QQTGRIPPT

SEQ ID NO: 7081 - protein, 127 aa, synthetic construct; identical to SEQ ID NO: 6881
  REGION 1..127: note = rafivirumab heavy chain V region

SEQ ID NO: 7082 - protein, 7 aa, synthetic construct
  REGION 1..7: note = rafivirumab heavy chain CDR1
GGTFNRY

SEQ ID NO: 7083 - protein, 8 aa, synthetic construct
  REGION 1..8: note = rafivirumab heavy chain CDR2
IIPIFGTA

SEQ ID NO: 7084 - protein, 20 aa, synthetic construct
  REGION 1..20: note = rafivirumab heavy chain CDR3
ARENLDNSGTYYYFSGWFDP

SEQ ID NO: 7085 - protein, 112 aa, synthetic construct; identical to SEQ ID NO: 6885
  REGION 1..112: note = rafivirumab light chain V region

SEQ ID NO: 7086 - protein, 9 aa, synthetic construct
  REGION 1..9: note = rafivirumab light chain CDR1
SSDIGGYNF

SEQ ID NO: 7087 - skipped

SEQ ID NO: 7088 - protein, 12 aa, synthetic construct
  REGION 1..12: note = rafivirumab light chain CDR3
CSYAGDYTPGVV

SEQ ID NO: 7089 - protein, 115 aa, synthetic construct
  REGION 1..115: note = ramucirumab heavy chain V region
VQLVQSGGGLVKPGGSLRLSCAASGFTFSSYSMNWVRQAPGKGLEWVSSISSSSSYIYYADSVKGRFTISRDNAKNSLYLQMNSLRAEDTAVYYCARVTDAFDIWGQGTMVTVSS

SEQ ID NO: 7090 - protein, 8 aa, synthetic construct
  REGION 1..8: note = ramucirumab heavy chain CDR1
GFTFSSYS

SEQ ID NO: 7091 - protein, 8 aa, synthetic construct
  REGION 1..8: note = ramucirumab heavy chain CDR2
ISSSSSYI

SEQ ID NO: 7092 - protein, 9 aa, synthetic construct
  REGION 1..9: note = ramucirumab heavy chain CDR3
ARVTDAFDI

SEQ ID NO: 7093 - protein, 107 aa, synthetic construct [sequence omitted]

SEQ ID NO: 7094 - protein, 6 aa, synthetic construct
  REGION 1..6: note = ramucirumab light chain CDR1
QGIDNW

SEQ ID NO: 7095 - skipped

SEQ ID NO: 7096 - protein, 9 aa, synthetic construct
  REGION 1..9: note = ramucirumab light chain CDR3
QQAKAFPPT

SEQ ID NO: 7097 - protein, 123 aa, synthetic construct [sequence omitted]

SEQ ID NO: 7098 - protein, 8 aa, synthetic construct
  REGION 1..8: note = ranibizumab heavy chain CDR1
GYDFTHYG

SEQ ID NO: 7099 - protein, 8 aa, synthetic construct
  REGION 1..8: note = ranibizumab heavy chain CDR2
INTYTGEP

SEQ ID NO: 7100 - protein, 16 aa, synthetic construct
  REGION 1..16: note = ranibizumab heavy chain CDR3
AKYPYYYGTSHWYFDV

SEQ ID NO: 7101 - protein, 107 aa, synthetic construct [sequence omitted]

SEQ ID NO: 7102 - protein, 6 aa, synthetic construct
  REGION 1..6: note = ranibizumab light chain CDR1
QDISNY

SEQ ID NO: 7103 - skipped

SEQ ID NO: 7104 - protein, 9 aa, synthetic construct
  REGION 1..9: note = ranibizumab light chain CDR3
QQYSTVPWT

SEQ ID NO: 7105 - protein, 122 aa, synthetic construct [sequence omitted]

SEQ ID NO: 7106 - protein, 7 aa, synthetic construct
  REGION 1..7: note = ravulizumab heavy chain CDR1
GHIFSNY

SEQ ID NO: 7107 - protein, 8 aa, synthetic construct
  REGION 1..8: note = ravulizumab heavy chain CDR2
ILPGSGHT

SEQ ID NO: 7108 - protein, 15 aa, synthetic construct
  REGION 1..15: note = ravulizumab heavy chain CDR3
ARYFFGSSPNWYFDV

SEQ ID NO: 7109 - protein, 107 aa, synthetic construct [sequence omitted]

SEQ ID NO: 7110 - protein, 6 aa, synthetic construct
  REGION 1..6: note = ravulizumab light chain CDR1
ENIYGA

SEQ ID NO: 7111 - skipped

SEQ ID NO: 7112 - protein, 9 aa, synthetic construct
  REGION 1..9: note = ravulizumab light chain CDR3
QNVLNTPLT

SEQ ID NO: 7113 - protein, 128 aa, synthetic construct; identical to SEQ ID NO: 460
  REGION 1..128: note = regdanvimab heavy chain V region

SEQ ID NO: 7114 - protein, 10 aa, synthetic construct
  REGION 1..10: note = regdanvimab heavy chain CDR1
GFSLSTSGVG

SEQ ID NO: 7115 - protein, 7 aa, synthetic construct
  REGION 1..7: note = regdanvimab heavy chain CDR2
IDWDDNK

SEQ ID NO: 7116 - protein, 20 aa, synthetic construct
  REGION 1..20: note = regdanvimab heavy chain CDR3
ARIPGFLRYRNRYYYYGMDV

SEQ ID NO: 7117 - protein, 110 aa, synthetic construct; identical to SEQ ID NO: 459
  REGION 1..110: note = regdanvimab light chain V region

SEQ ID NO: 7118 - protein, 8 aa, synthetic construct
  REGION 1..8: note = regdanvimab light chain CDR1
SSNIGNNY

SEQ ID NO: 7119 - skipped

SEQ ID NO: 7120 - protein, 11 aa, synthetic construct
  REGION 1..11: note = regdanvimab light chain CDR3
GTWDSSLSAGV

SEQ ID NO: 7121 - protein, 120 aa, synthetic construct
  REGION 1..120: note = relatlimab heavy chain V region
QVQLQQWGAGLLKPSETLSLTCAVYGGSFSDYYWNWIRQPPGKGLEWIGEINHRGSTNSNPSLKSRVTLSLDTSKNQFSLKLRSVTAADTAVYYCAFGYSDYEYNWFDPWGQGTLVTVSS

SEQ ID NO: 7122 - protein, 8 aa, synthetic construct
  REGION 1..8: note = relatlimab heavy chain CDR1
GGSFSDYY

SEQ ID NO: 7123 - protein, 7 aa, synthetic construct
  REGION 1..7: note = relatlimab heavy chain CDR2
INHRGST

SEQ ID NO: 7124 - protein, 14 aa, synthetic construct
  REGION 1..14: note = relatlimab heavy chain CDR3
AFGYSDYEYNWFDP

SEQ ID NO: 7125 - protein, 107 aa, synthetic construct
  REGION 1..107: note = relatlimab light chain V region
EIVLTQSPATLSLSPGERATLSCRASQSISSYLAWYQQKPGQAPRLLIYDASNRATGIPARFSGSGSGTDFTLTISSLEPEDFAVYYCQQRSNWPLTFGQGTNLEIK

SEQ ID NO: 7126 - protein, 6 aa, synthetic construct
  REGION 1..6: note = relatlimab light chain CDR1
QSISSY

SEQ ID NO: 7127 - skipped

SEQ ID NO: 7128 - protein, 9 aa, synthetic construct
  REGION 1..9: note = relatlimab light chain CDR3
QQRSNWPLT

SEQ ID NO: 7129 - protein, 121 aa, synthetic construct [sequence omitted]

SEQ ID NO: 7130 - protein, 8 aa, synthetic construct
  REGION 1..8: note = remtolumab heavy chain CDR1
GFTFDDYA

SEQ ID NO: 7131 - protein, 8 aa, synthetic construct
  REGION 1..8: note = remtolumab heavy chain CDR2
ITWNSGHI

SEQ ID NO: 7132 - protein, 14 aa, synthetic construct
  REGION 1..14: note = remtolumab heavy chain CDR3
AKVSYLSTASSLDY

SEQ ID NO: 7133 - protein, 107 aa, synthetic construct [sequence omitted]

SEQ ID NO: 7134 - protein, 6 aa, synthetic construct
  REGION 1..6: note = remtolumab light chain CDR1
QGIRNY

SEQ ID NO: 7135 - skipped

SEQ ID NO: 7136 - protein, 9 aa, synthetic construct
  REGION 1..9: note = remtolumab light chain CDR3
HQTDSLPYT

SEQ ID NO: 7137 - protein, 119 aa, synthetic construct; identical to SEQ ID NO: 5177
  REGION 1..119: note = retlirafusp alfa heavy chain V region

SEQ ID NO: 7138 - protein, 8 aa, synthetic construct
  REGION 1..8: note = retlirafusp alfa heavy chain CDR1
GYTFTSYW

SEQ ID NO: 7139 - protein, 8 aa, synthetic construct
  REGION 1..8: note = retlirafusp alfa heavy chain CDR2
IGPNSGFT

SEQ ID NO: 7140 - protein, 12 aa, synthetic construct
  REGION 1..12: note = retlirafusp alfa heavy chain CDR3
ARGGSSYDYFDY

SEQ ID NO: 7141 - protein, 111 aa, synthetic construct; identical to SEQ ID NO: 5181
  REGION 1..111: note = retlirafusp alfa light chain V region

SEQ ID NO: 7142 - protein, 10 aa, synthetic construct
  REGION 1..10: note = retlirafusp alfa light chain CDR1
ESVSIHGTHL

SEQ ID NO: 7143 - skipped

SEQ ID NO: 7144 - protein, 9 aa, synthetic construct
  REGION 1..9: note = retlirafusp alfa light chain CDR3
QQSFEDPLT

SEQ ID NO: 7145 - protein, 120 aa, synthetic construct
  REGION 1..120: note = rilotumumab heavy chain V region
QVQLQESGPGLVKPSETLSLTCTVSGGSISIYYWSWIRQPPGKGLEWIGYVYYSGSTNYNPSLKSRVTISVDTSKNQFSLKLNSVTAADTAVYYCARGGYDFWSGYFDYWGQGTLVTVSS

SEQ ID NO: 7146 - protein, 8 aa, synthetic construct
  REGION 1..8: note = rilotumumab heavy chain CDR1
GGSISIYY

SEQ ID NO: 7147 - protein, 7 aa, synthetic construct
  REGION 1..7: note = rilotumumab heavy chain CDR2
VYYSGST

SEQ ID NO: 7148 - protein, 14 aa, synthetic construct
  REGION 1..14: note = rilotumumab heavy chain CDR3
ARGGYDFWSGYFDY

SEQ ID NO: 7149 - protein, 108 aa, synthetic construct
  REGION 1..108: note = rilotumumab light chain V region
EIVMTQSPATLSVSPGERATLSCRASQSVDSNLAWYRQKPGQAPRLLIYGASTRATGIPARFSGSGSGTEFTLTISSLQSEDFAVYYCQQYINWPPITFGQGTRLEIK

SEQ ID NO: 7150 - protein, 6 aa, synthetic construct
  REGION 1..6: note = rilotumumab light chain CDR1
QSVDSN

SEQ ID NO: 7151 - skipped

SEQ ID NO: 7152 - protein, 10 aa, synthetic construct
  REGION 1..10: note = rilotumumab light chain CDR3
QQYINWPPIT

SEQ ID NO: 7153 - protein, 122 aa, synthetic construct
  REGION 1..122: note = rinucumab heavy chain V region
QLQLQESGPGLVKPSETLSLTCTVSGGSITSSSYYWGWIRQPPGKGLEWIGSIYYRGSTNYNPSLKSRVTISVDSSKNQFYLKVSSVTAVDTAVYYCARQNGAARPSWFDPWGQGTLVTVSS

SEQ ID NO: 7154 - protein, 10 aa, synthetic construct
  REGION 1..10: note = rinucumab heavy chain CDR1
GGSITSSSYY

SEQ ID NO: 7155 - protein, 8 aa, synthetic construct
  REGION 1..8: note = rinucumab heavy chain CDR2
IYYRGSTN

SEQ ID NO: 7156 - protein, 14 aa, synthetic construct
  REGION 1..14: note = rinucumab heavy chain CDR3
ARQNGAARPSWFDP

SEQ ID NO: 7157 - protein, 108 aa, synthetic construct
  REGION 1..108: note = rinucumab light chain V region
EIVLTQSPDTISLSPGERATLSCRASQSISSIYLAWYQQKPGQAPRLLIYGASSRVTGIPDRFSVSGSGTDFTLTISRLEPEDFAVYYCQHYGISPFTFGPGTKVDIR

SEQ ID NO: 7158 - protein, 7 aa, synthetic construct
  REGION 1..7: note = rinucumab light chain CDR1
QSISSIY

SEQ ID NO: 7159 - skipped

SEQ ID NO: 7160 - protein, 9 aa, synthetic construct
  REGION 1..9: note = rinucumab light chain CDR3
QHYGISPFT

SEQ ID NO: 7161 - protein, 120 aa, synthetic construct
  REGION 1..120: note = risankizumab heavy chain V region
QVQLVQSGAEVKKPGSSVKVSCKASGYTFTDQTIHWMRQAPGQGLEWIGYIYPRDDSPKYNENFKGKVTITADKSTSTAYMELSSLRSEDTAVYYCAIPDRSGYAWFIYWGQGTLVTVSS

SEQ ID NO: 7162 - protein, 8 aa, synthetic construct
  REGION 1..8: note = risankizumab heavy chain CDR1
GYTFTDQT

SEQ ID NO: 7163 - protein, 8 aa, synthetic construct
  REGION 1..8: note = risankizumab heavy chain CDR2
IYPRDDSP

SEQ ID NO: 7164 - protein, 13 aa, synthetic construct
  REGION 1..13: note = risankizumab heavy chain CDR3
AIPDRSGYAWFIY

SEQ ID NO: 7165 - protein, 107 aa, synthetic construct
  REGION 1..107: note = risankizumab light chain V region
DIQMTQSPSSLSASVGDRVTITCKASRDVAIAVAWYQQKPGKVPKLLIYWASTRHTGVPSRFSGSGSRTDFTLTISSLQPEDVADYFCHQYSSYPFTFGSGTKLEIK

SEQ ID NO: 7166 - protein, 6 aa, synthetic construct
  REGION 1..6: note = risankizumab light chain CDR1
RDVAIA

SEQ ID NO: 7167 - skipped

SEQ ID NO: 7168 - protein, 9 aa, synthetic construct
  REGION 1..9: note = risankizumab light chain CDR3
HQYSSYPFT

SEQ ID NO: 7169 - protein, 120 aa, synthetic construct
  REGION 1..120: note = rituximab heavy chain V region
QVQLQQPGAELVKPGASVKMSCKASGYTFTSYNMHWVKQTPGRGLEWIGAIYPGNGDTSYNQKFKGKATLTADKSSSTAYMQLSSLTSEDSAVYYCARSTYYGGDWYFNVWGAGTTVTVS

SEQ ID NO: 7170 - protein, 8 aa, synthetic construct
  REGION 1..8: note = rituximab heavy chain CDR1
GYTFTSYN

SEQ ID NO: 7171 - protein, 8 aa, synthetic construct
  REGION 1..8: note = rituximab heavy chain CDR2
IYPGNGDT

SEQ ID NO: 7172 - protein, 14 aa, synthetic construct
  REGION 1..14: note = rituximab heavy chain CDR3
ARSTYYGGDWYFNV

SEQ ID NO: 7173 - protein, 106 aa, synthetic construct [sequence omitted]

SEQ ID NO: 7174 - protein, 5 aa, synthetic construct
  REGION 1..5: note = rituximab light chain CDR1
SSVSY

SEQ ID NO: 7175 - skipped

SEQ ID NO: 7176 - protein, 9 aa, synthetic construct
  REGION 1..9: note = rituximab light chain CDR3
QQWTSNPPT

SEQ ID NO: 7177 - protein, 118 aa, synthetic construct [sequence omitted]

SEQ ID NO: 7178 - protein, 8 aa, synthetic construct
  REGION 1..8: note = robatumumab heavy chain CDR1
GFTFSSFA

SEQ ID NO: 7179 - protein, 8 aa, synthetic construct
  REGION 1..8: note = robatumumab heavy chain CDR2
IDTRGATY

SEQ ID NO: 7180 - protein, 12 aa, synthetic construct
  REGION 1..12: note = robatumumab heavy chain CDR3
ARLGNFYYGMDV

SEQ ID NO: 7181 - protein, 107 aa, synthetic construct [sequence omitted]

SEQ ID NO: 7182 - protein, 6 aa, synthetic construct
  REGION 1..6: note = robatumumab light chain CDR1
QSIGSS

SEQ ID NO: 7183 - skipped

SEQ ID NO: 7184 - protein, 9 aa, synthetic construct
  REGION 1..9: note = robatumumab light chain CDR3
HQSSRLPHT

SEQ ID NO: 7185 - protein, 117 aa, synthetic construct
  REGION 1..117: note = rocatinlimab heavy chain V region
QITLKESGPTLVKPKQTLTLTCTFSGFSLSTSGMGVGWIRQPPGKALEWLAVIYWDDHQLYSPSLKSRLTITKDTSKNQVVLTMTNMDPVDTATYYCAHRRGAFQHWGQGTLVTVSS

SEQ ID NO: 7186 - protein, 10 aa, synthetic construct
  REGION 1..10: note = rocatinlimab heavy chain CDR1
GFSLSTSGMG

SEQ ID NO: 7187 - protein, 7 aa, synthetic construct
  REGION 1..7: note = rocatinlimab heavy chain CDR2
IYWDDHQ

SEQ ID NO: 7188 - protein, 9 aa, synthetic construct
  REGION 1..9: note = rocatinlimab heavy chain CDR3
AHRRGAFQH

SEQ ID NO: 7189 - protein, 107 aa, synthetic construct
  REGION 1..107: note = rocatinlimab light chain V region
EIVLTQSPGTLSLSPGERATLSCRASQSVSSSYLAWYQQKPGQAPRLLIYGASSRATGIPDRFSGSGSGTDFTLTISRLEPEDFAVYYCQQYDSSLTFGGGTKVEIK

SEQ ID NO: 7190 - protein, 7 aa, synthetic construct
  REGION 1..7: note = rocatinlimab light chain CDR1
QSVSSSY

SEQ ID NO: 7191 - skipped

SEQ ID NO: 7192 - protein, 7 aa, synthetic construct
  REGION 1..7: note = rocatinlimab light chain CDR3
QQYDSSL

SEQ ID NO: 7193 - protein, 126 aa, synthetic construct
  REGION 1..126: note = roledumab heavy chain V region
QVQLVESGGGVVQPGRSLRLSCTASGFTFKNYAMHWVRQAPAKGLEWVATISYDGRNIQYADSVKGRFTFSRDNSQDTLYLQLNSLRPEDTAVYYCARPVRSRWLQLGLEDAFHIWGQGTMVTVSS

SEQ ID NO: 7194 - protein, 7 aa, synthetic construct
  REGION 1..7: note = roledumab heavy chain CDR1
GFTFKNY

SEQ ID NO: 7195 - protein, 8 aa, synthetic construct
  REGION 1..8: note = roledumab heavy chain CDR2
ISYDGRNI

SEQ ID NO: 7196 - protein, 19 aa, synthetic construct
  REGION 1..19: note = roledumab heavy chain CDR3
ARPVRSRWLQLGLEDAFHI

SEQ ID NO: 7197 - protein, 106 aa, synthetic construct
  REGION 1..106: note = roledumab light chain V region
AIRMTQSPSSFSASTGDRVTITCRASQDIRNYVAWYQQKSGKAPKFLIYAASTLQSGVPSRFSGSGSGTDFTLTINSLQSEDFATYYCQQYYNSPPTFGQGTRVEI

SEQ ID NO: 7198 - protein, 6 aa, synthetic construct
  REGION 1..6: note = roledumab light chain CDR1
QDIRNY

SEQ ID NO: 7199 - skipped

SEQ ID NO: 7200 - protein, 9 aa, synthetic construct
  REGION 1..9: note = roledumab light chain CDR3
QQYYNSPPT

SEQ ID NO: 7201 - protein, 119 aa, synthetic construct
  REGION 1..119: note = romlusevimab heavy chain V region
QVQLVQSGSELKKPGASVKVSCKASGYTFTTYVMNWVRQAPGQGLEWMGWINTNTGNPTYAQGFTGRFVFSLDTSVSTASLQISSLKAEDTAVYYCSSEITTLGGMDVWGQGTTVTVSS

SEQ ID NO: 7202 - protein, 8 aa, synthetic construct
  REGION 1..8: note = romlusevimab heavy chain CDR1
GYTFTTYV

SEQ ID NO: 7203 - protein, 8 aa, synthetic construct
  REGION 1..8: note = romlusevimab heavy chain CDR2
INTNTGNP

SEQ ID NO: 7204 - protein, 12 aa, synthetic construct
  REGION 1..12: note = romlusevimab heavy chain CDR3
SSEITTLGGMDV

SEQ ID NO: 7205 - protein, 108 aa, synthetic construct
  REGION 1..108: note = romlusevimab light chain V region
SYVLTQPPSVSVAPGKTARITCGGNNIGSKSVHWYQQKPGQAPVLVIYYDSDRPSGIPERFSGSNSGNTATLTISGVEAGDEADYYCQVWDSISDHRVFGGGTKLTVL

SEQ ID NO: 7206 - protein, 6 aa, synthetic construct
  REGION 1..6: note = romlusevimab light chain CDR1
NIGSKS

SEQ ID NO: 7207 - skipped

SEQ ID NO: 7208 - protein, 11 aa, synthetic construct
  REGION 1..11: note = romlusevimab light chain CDR3
QVWDSISDHRV

SEQ ID NO: 7209 - protein, 123 aa, synthetic construct [sequence omitted]

SEQ ID NO: 7210 - protein, 8 aa, synthetic construct
  REGION 1..8: note = romosozumab heavy chain CDR1
GYTFTDYN

SEQ ID NO: 7211 - protein, 8 aa, synthetic construct
  REGION 1..8: note = romosozumab heavy chain CDR2
INPNSGGA

SEQ ID NO: 7212 - protein, 16 aa, synthetic construct
  REGION 1..16: note = romosozumab heavy chain CDR3
ARLGYDDIYDDWYFDV

SEQ ID NO: 7213 - protein, 107 aa, synthetic construct [sequence omitted]

SEQ ID NO: 7214 - protein, 6 aa, synthetic construct
  REGION 1..6: note = romosozumab light chain CDR1
QDISNY

SEQ ID NO: 7215 - skipped

SEQ ID NO: 7216 - protein, 9 aa, synthetic construct
  REGION 1..9: note = romosozumab light chain CDR3
QQGDTLPYT

SEQ ID NO: 7217 - protein, 117 aa, synthetic construct
  REGION 1..117: note = rosmantuzumab heavy chain V region
QVQLVQSGAEVKKPGASVKVSCKASGYTFTDYSIHWVRQAPGQGLEWIGYIYPSNGDSGYNQKFKNRVTMTRDTSTSTAYMELSRLRSEDTAVYYCATYFANNFDYWGQGTTLTVSS

SEQ ID NO: 7218 - protein, 8 aa, synthetic construct
  REGION 1..8: note = rosmantuzumab heavy chain CDR1
GYTFTDYS

SEQ ID NO: 7219 - protein, 8 aa, synthetic construct
  REGION 1..8: note = rosmantuzumab heavy chain CDR2
IYPSNGDS

SEQ ID NO: 7220 - protein, 10 aa, synthetic construct
  REGION 1..10: note = rosmantuzumab heavy chain CDR3
ATYFANNFDY

SEQ ID NO: 7221 - protein, 111 aa, synthetic construct
  REGION 1..111: note = rosmantuzumab light chain V region
DIQMTQSPSSLSASVGDRVTITCKASQSVDYDGDSYMNWYQQKPGKAPKLLIYAASNLESGVPSRFSGSGSGTDFTLTISPVQAEDFATYYCQQSNEDPLTFGAGTKLELK

SEQ ID NO: 7222 - protein, 10 aa, synthetic construct
  REGION 1..10: note = rosmantuzumab light chain CDR1
QSVDYDGDSY

SEQ ID NO: 7223 - skipped

SEQ ID NO: 7224 - protein, 9 aa, synthetic construct
  REGION 1..9: note = rosmantuzumab light chain CDR3
QQSNEDPLT

SEQ ID NO: 7225 - protein, 121 aa, synthetic construct; identical to SEQ ID NO: 7033
  REGION 1..121: note = rozibafusp alfa heavy chain V region

SEQ ID NO: 7226 - protein, 7 aa, synthetic construct
  REGION 1..7: note = rozibafusp alfa heavy chain CDR1
GFTFSSY

SEQ ID NO: 7227 - protein, 8 aa, synthetic construct
  REGION 1..8: note = rozibafusp alfa heavy chain CDR2
IKQDGNEK

SEQ ID NO: 7228 - protein, 14 aa, synthetic construct
  REGION 1..14: note = rozibafusp alfa heavy chain CDR3
AREGILWFGDLPTF

SEQ ID NO: 7229 - protein, 107 aa, synthetic construct; identical to SEQ ID NO: 7037
  REGION 1..107: note = rozibafusp alfa light chain V region

SEQ ID NO: 7230 - protein, 6 aa, synthetic construct
  REGION 1..6: note = rozibafusp alfa light chain CDR1
QGISNW

SEQ ID NO: 7231 - skipped

SEQ ID NO: 7232 - protein, 9 aa, synthetic construct
  REGION 1..9: note = rozibafusp alfa light chain CDR3
QQYDSYPRT

SEQ ID NO: 7233 - protein, 121 aa, synthetic construct
  REGION 1..121: note = sacituzumab govitecan heavy chain V region
QVQLQQSGSELKKPGASVKVSCKASGYTFTNYGMNWVKQAPGQGLKWMGWINTYTGEPTYTDDFKGRFAFSLDTSVSTAYLQISSLKADDTAVYFCARGGFGSSYWYFDVWGQGSLVTVSS

SEQ ID NO: 7234 - protein, 8 aa, synthetic construct
  REGION 1..8: note = sacituzumab govitecan heavy chain CDR1
GYTFTNYG

SEQ ID NO: 7235 - protein, 8 aa, synthetic construct
  REGION 1..8: note = sacituzumab govitecan heavy chain CDR2
INTYTGEP

SEQ ID NO: 7236 - protein, 14 aa, synthetic construct
  REGION 1..14: note = sacituzumab govitecan heavy chain CDR3
ARGGFGSSYWYFDV

SEQ ID NO: 7237 - protein, 107 aa, synthetic construct
  REGION 1..107: note = sacituzumab govitecan light chain V region
DIQLTQSPSSLSASVGDRVSITCKASQDVSIAVAWYQQKPGKAPKLLIYSASYRYTGVPDRFSGSGSGTDFTLTISSLQPEDFAVYYCQQHYITPLTFGAGTKVEIK

SEQ ID NO: 7238 - protein, 6 aa, synthetic construct
  REGION 1..6: note = sacituzumab govitecan light chain CDR1
QDVSIA

SEQ ID NO: 7239 - skipped

SEQ ID NO: 7240 - protein, 9 aa, synthetic construct
  REGION 1..9: note = sacituzumab govitecan light chain CDR3
QQHYITPLT

SEQ ID NO: 7241 - protein, 116 aa, synthetic construct
  REGION 1..116: note = sarilumab heavy chain V region
EVQLVESGGGLVQPGRSLRLSCAASRFTFDDYAMHWVRQAPGKGLEWVSGISWNSGRIGYADSVKGRFTISRDNAENSLFLQMNGLRAEDTALYYCAKGRDSFDIWGQGTMVTVSS

SEQ ID NO: 7242 - protein, 8 aa, synthetic construct
  REGION 1..8: note = sarilumab heavy chain CDR1
RFTFDDYA

SEQ ID NO: 7243 - protein, 8 aa, synthetic construct
  REGION 1..8: note = sarilumab heavy chain CDR2
ISWNSGRI

SEQ ID NO: 7244 - protein, 9 aa, synthetic construct
  REGION 1..9: note = sarilumab heavy chain CDR3
AKGRDSFDI

SEQ ID NO: 7245 - protein, 107 aa, synthetic construct
  REGION 1..107: note = sarilumab light chain V region
DIQMTQSPSSVSASVGDRVTITCRASQGISSWLAWYQQKPGKAPKLLIYGASSLESGVPSRFSGSGSGTDFTLTISSLQPEDFASYYCQQANSFPYTFGQGTKLEIK

SEQ ID NO: 7246 - protein, 6 aa, synthetic construct
  REGION 1..6: note = sarilumab light chain CDR1
QGISSW

SEQ ID NO: 7247 - skipped

SEQ ID NO: 7248 - protein, 9 aa, synthetic construct
  REGION 1..9: note = sarilumab light chain CDR3
QQANSFPYT

SEQ ID NO: 7249 - protein, 119 aa, synthetic construct
  REGION 1..119: note = satralizumab heavy chain V region
QVQLQESGPGLVKPSETLSLTCAVSGHSISHDHAWSWVRQPPGEGLEWIGFISYSGITNYNPSLQGRVTISRDNSKNTLYLQMNSLRAEDTAVYYCARSLARTTAMDYWGEGTLVTVSS

SEQ ID NO: 7250 - protein, 9 aa, synthetic construct
  REGION 1..9: note = satralizumab heavy chain CDR1
GHSISHDHA

SEQ ID NO: 7251 - protein, 7 aa, synthetic construct
  REGION 1..7: note = satralizumab heavy chain CDR2
ISYSGIT

SEQ ID NO: 7252 - protein, 12 aa, synthetic construct
  REGION 1..12: note = satralizumab heavy chain CDR3
ARSLARTTAMDY

SEQ ID NO: 7253 - protein, 107 aa, synthetic construct
  REGION 1..107: note = satralizumab light chain V region
DIQMTQSPSSLSASVGDSVTITCQASTDISSHLNWYQQKPGKAPELLIYYGSHLLSGVPSRFSGSGSGTDFTFTISSLEAEDAATYYCGQGNRLPYTFGQGTKVEIE

SEQ ID NO: 7254 - protein, 6 aa, synthetic construct
  REGION 1..6: note = satralizumab light chain CDR1
TDISSH

SEQ ID NO: 7255 - skipped

SEQ ID NO: 7256 - protein, 9 aa, synthetic construct
  REGION 1..9: note = satralizumab light chain CDR3
GQGNRLPYT

SEQ ID NO: 7257 - protein, 127 aa, synthetic construct [sequence omitted]

SEQ ID NO: 7258 - protein, 8 aa, synthetic construct
  REGION 1..8: note = secukinumab heavy chain CDR1
GFTFSNYW

SEQ ID NO: 7259 - protein, 8 aa, synthetic construct
  REGION 1..8: note = secukinumab heavy chain CDR2
INQDGSEK

SEQ ID NO: 7260 - protein, 20 aa, synthetic construct [sequence omitted]

SEQ ID NO: 7261 - protein, 108 aa, synthetic construct [sequence omitted]

SEQ ID NO: 7262 - protein, 7 aa, synthetic construct
  REGION 1..7: note = secukinumab light chain CDR1
QSVSSSY

SEQ ID NO: 7263 - skipped

SEQ ID NO: 7264 - protein, 9 aa, synthetic construct
  REGION 1..9: note = secukinumab light chain CDR3
QQYGSSPCT

SEQ ID NO: 7265 - protein, 126 aa, synthetic construct
  REGION 1..126: note = selicrelumab heavy chain V region
QVQLVQSGAEVKKPGASVKVSCKASGYTFTGYYMHWVRQAPGQGLEWMGWINPDSGGTNYAQKFQGRVTMTRDTSISTAYMELNRLRSDDTAVYYCARDQPLGYCTNGVCSYFDYWGQGTLVTVSS

SEQ ID NO: 7266 - protein, 8 aa, synthetic construct
  REGION 1..8: note = selicrelumab heavy chain CDR1
GYTFTGYY

SEQ ID NO: 7267 - protein, 8 aa, synthetic construct
  REGION 1..8: note = selicrelumab heavy chain CDR2
INPDSGGT

SEQ ID NO: 7268 - protein, 19 aa, synthetic construct
  REGION 1..19: note = selicrelumab heavy chain CDR3
ARDQPLGYCTNGVCSYFDY

SEQ ID NO: 7269 - protein, 107 aa, synthetic construct
  REGION 1..107: note = selicrelumab light chain V region
DIQMTQSPSSVSASVGDRVTITCRASQGIYSWLAWYQQKPGKAPNLLIYTASTLQSGVPSRFSGSGSGTDFTLTISSLQPEDFATYYCQQANIFPLTFGGGTKVEIK

SEQ ID NO: 7270 - protein, 7 aa, synthetic construct
  REGION 1..7: note = selicrelumab light chain CDR1
QGIYSWL

SEQ ID NO: 7271 - skipped

SEQ ID NO: 7272 - protein, 9 aa, synthetic construct
  REGION 1..9: note = selicrelumab light chain CDR3
QQANIFPLT

SEQ ID NO: 7273 - protein, 119 aa, synthetic construct [sequence omitted]

SEQ ID NO: 7274 - protein, 8 aa, synthetic construct
  REGION 1..8: note = seribantumab heavy chain CDR1
GFTFSHYV

SEQ ID NO: 7275 - protein, 8 aa, synthetic construct
  REGION 1..8: note = seribantumab heavy chain CDR2
ISSSGGWT

SEQ ID NO: 7276 - protein, 12 aa, synthetic construct
  REGION 1..12: note = seribantumab heavy chain CDR3
TRGLKMATIFDY

SEQ ID NO: 7277 - protein, 111 aa, synthetic construct [sequence omitted]

SEQ ID NO: 7278 - protein, 8 aa, synthetic construct
  REGION 1..8: note = seribantumab light chain CDR1
SSDVGSYN

SEQ ID NO: 7279 - skipped

SEQ ID NO: 7280 - protein, 10 aa, synthetic construct
  REGION 1..10: note = seribantumab light chain CDR3
SYAGSSIFVI

SEQ ID NO: 7281 - protein, 117 aa, synthetic construct
  REGION 1..117: note = setrusumab heavy chain V region
QVQLVESGGGLVQPGGSLRLSCAASGFTFRSHWLSWVRQAPGKGLEWVSNINYDGSSTYYADSVKGRFTISRDNSKNTLYLQMNSLRAEDTAVYYCARDTYLHFDYWGQGTLVTVSS

SEQ ID NO: 7282 - protein, 8 aa, synthetic construct
  REGION 1..8: note = setrusumab heavy chain CDR1
GFTFRSHW

SEQ ID NO: 7283 - protein, 8 aa, synthetic construct
  REGION 1..8: note = setrusumab heavy chain CDR2
INYDGSST

SEQ ID NO: 7284 - protein, 10 aa, synthetic construct
  REGION 1..10: note = setrusumab heavy chain CDR3
ARDTYLHFDY

SEQ ID NO: 7285 - protein, 111 aa, synthetic construct
  REGION 1..111: note = setrusumab light chain V region
DIALTQPASVSGSPGQSITISCTGTSSDVGDINDVSWYQQHPGKAPKLMIYDVNNRPSGVSNRFSGSKSGNTASLTISGLQAEDEADYYCQSYAGSYLSEVFGGGTKLTVL

SEQ ID NO: 7286 - protein, 9 aa, synthetic construct
  REGION 1..9: note = setrusumab light chain CDR1
SSDVGDIND

SEQ ID NO: 7287 - skipped

SEQ ID NO: 7288 - protein, 11 aa, synthetic construct
  REGION 1..11: note = setrusumab light chain CDR3
QSYAGSYLSEV

SEQ ID NO: 7289 - protein, 116 aa, synthetic construct [sequence omitted]

SEQ ID NO: 7290 - protein, 8 aa, synthetic construct
  REGION 1..8: note = sifalimumab heavy chain CDR1
GYTFTSYS

SEQ ID NO: 7291 - protein, 8 aa, synthetic construct
  REGION 1..8: note = sifalimumab heavy chain CDR2
ISVYNGNT

SEQ ID NO: 7292 - protein, 9 aa, synthetic construct
  REGION 1..9: note = sifalimumab heavy chain CDR3
ARDPIAAGY

SEQ ID NO: 7293 - protein, 108 aa, synthetic construct [sequence omitted]

SEQ ID NO: 7294 - protein, 7 aa, synthetic construct
  REGION 1..7: note = sifalimumab light chain CDR1
QSVSSTY

SEQ ID NO: 7295 - skipped

SEQ ID NO: 7296 - protein, 9 aa, synthetic construct
  REGION 1..9: note = sifalimumab light chain CDR3
QQYGSSPRT

SEQ ID NO: 7297 - protein, 119 aa, synthetic construct [sequence omitted]

SEQ ID NO: 7298 - protein, 8 aa, synthetic construct
  REGION 1..8: note = siltuximab heavy chain CDR1
GFTFSSFA

SEQ ID NO: 7299 - protein, 8 aa, synthetic construct
  REGION 1..8: note = siltuximab heavy chain CDR2
ISSGGSYT

SEQ ID NO: 7300 - protein, 12 aa, synthetic construct
  REGION 1..12: note = siltuximab heavy chain CDR3
ARGLWGYYALDY

SEQ ID NO: 7301 - protein, 106 aa, synthetic construct [sequence omitted]

SEQ ID NO: 7302 - protein, 5 aa, synthetic construct
  REGION 1..5: note = siltuximab light chain CDR1
SSVSY

SEQ ID NO: 7303 - skipped

SEQ ID NO: 7304 - protein, 9 aa, synthetic construct
  REGION 1..9: note = siltuximab light chain CDR3
QQWSGYPYT

SEQ ID NO: 7305 - protein, 120 aa, synthetic construct
  REGION 1..120: note = sintilimab heavy chain V region
QVQLVQSGAEVKKPGSSVKVSCKASGGTFSSYAISWVRQAPGQGLEWMGLIIPMFDTAGYAQKFQGRVAITVDESTSTAYMELSSLRSEDTAVYYCARAEHSSTGTFDYWGQGTLVTVSS

SEQ ID NO: 7306 - protein, 8 aa, synthetic construct
  REGION 1..8: note = sintilimab heavy chain CDR1
GGTFSSYA

SEQ ID NO: 7307 - protein, 9 aa, synthetic construct
  REGION 1..9: note = sintilimab heavy chain CDR2
IIPMFDTAG

SEQ ID NO: 7308 - protein, 13 aa, synthetic construct
  REGION 1..13: note = sintilimab heavy chain CDR3
ARAEHSSTGTFDY

SEQ ID NO: 7309 - protein, 107 aa, synthetic construct; identical to SEQ ID NO: 6069
  REGION 1..107: note = sintilimab light chain V region

SEQ ID NO: 7310 - protein, 6 aa, synthetic construct
  REGION 1..6: note = sintilimab light chain CDR1
QGISSW

SEQ ID NO: 7311 - skipped

SEQ ID NO: 7312 - protein, 9 aa, synthetic construct
  REGION 1..9: note = sintilimab light chain CDR3
QQANHLPFT

SEQ ID NO: 7313 - protein, 120 aa, synthetic construct
  REGION 1..120: note = sirtratumab heavy chain V region
QVQLVESGGGVVQPGRSLRLSCAASGFTFSSYGMHWVRQAPGKGLEWVAVIWYDGSNQYYADSVKGRFTISRDNSKNTLFLQMHSLRAEDTAVYYCARGLTSGRYGMDVWGQGTTVTVSS

SEQ ID NO: 7314 - protein, 7 aa, synthetic construct
  REGION 1..7: note = sirtratumab heavy chain CDR1
GFTFSSY

SEQ ID NO: 7315 - protein, 8 aa, synthetic construct
  REGION 1..8: note = sirtratumab heavy chain CDR2
IWYDGSNQ

SEQ ID NO: 7316 - protein, 13 aa, synthetic construct
  REGION 1..13: note = sirtratumab heavy chain CDR3
ARGLTSGRYGMDV

SEQ ID NO: 7317 - protein, 112 aa, synthetic construct
  REGION 1..112: note = sirtratumab light chain V region
DIVMTQSPLSLPVTPGEPASISCRSSQSLLLSHGFNYLDWYLQKPGQSPQLLIYLGSSRASGVPDRFSGSGSGTDFTLKISRVEAEDVGLYYCMQPLQIPWTFGQGTKVEIK

SEQ ID NO: 7318 - protein, 11 aa, synthetic construct
  REGION 1..11: note = sirtratumab light chain CDR1
QSLLLSHGFNY

SEQ ID NO: 7319 - skipped

SEQ ID NO: 7320 - protein, 8 aa, synthetic construct
  REGION 1..8: note = sirtratumab light chain CDR3
QPLQIPWT

SEQ ID NO: 7321 - protein, 120 aa, synthetic construct; identical to SEQ ID NO: 7313
  REGION 1..120: note = sirtratumab vedotin heavy chain V region

SEQ ID NO: 7322 - protein, 7 aa, synthetic construct
  REGION 1..7: note = sirtratumab vedotin heavy chain CDR1
GFTFSSY

SEQ ID NO: 7323 - protein, 8 aa, synthetic construct
  REGION 1..8: note = sirtratumab vedotin heavy chain CDR2
IWYDGSNQ

SEQ ID NO: 7324 - protein, 13 aa, synthetic construct
  REGION 1..13: note = sirtratumab vedotin heavy chain CDR3
ARGLTSGRYGMDV

SEQ ID NO: 7325 - protein, 112 aa, synthetic construct; identical to SEQ ID NO: 7317
  REGION 1..112: note = sirtratumab vedotin light chain V region

SEQ ID NO: 7326 - protein, 10 aa, synthetic construct
  REGION 1..10: note = sirtratumab vedotin light chain CDR1
SLLLSHGFNY

SEQ ID NO: 7327 - skipped

SEQ ID NO: 7328 - protein, 9 aa, synthetic construct
  REGION 1..9: note = sirtratumab vedotin light chain CDR3
MQPLQIPWT

SEQ ID NO: 7329 - protein, 119 aa, synthetic construct
  REGION 1..119: note = sirukumab heavy chain V region
EVQLVESGGGLVQPGGSLRLSCAASGFTFSPFAMSWVRQAPGKGLEWVAKISPGGSWTYYSDTVTGRFTISRDNAKNSLYLQMNSLRAEDTAVYYCARQLWGYYALDIWGQGTTVTVSS

SEQ ID NO: 7330 - protein, 8 aa, synthetic construct
  REGION 1..8: note = sirukumab heavy chain CDR1
GFTFSPFA

SEQ ID NO: 7331 - protein, 8 aa, synthetic construct
  REGION 1..8: note = sirukumab heavy chain CDR2
ISPGGSWT

SEQ ID NO: 7332 - protein, 12 aa, synthetic construct
  REGION 1..12: note = sirukumab heavy chain CDR3
ARQLWGYYALDI

SEQ ID NO: 7333 - protein, 106 aa, synthetic construct
  REGION 1..106: note = sirukumab light chain V region
EIVLTQSPATLSLSPGERATLSCSASISVSYMYWYQQKPGQAPRLLIYDMSNLASGIPARFSGSGSGTDFTLTISSLEPEDFAVYYCMQWSGYPYTFGGGTKVEIK

SEQ ID NO: 7334 - protein, 5 aa, synthetic construct
  REGION 1..5: note = sirukumab light chain CDR1
ISVSY

SEQ ID NO: 7335 - skipped

SEQ ID NO: 7336 - protein, 9 aa, synthetic construct
  REGION 1..9: note = sirukumab light chain CDR3
MQWSGYPYT

SEQ ID NO: 7337 - protein, 119 aa, synthetic construct
  REGION 1..119: note = socazolimab heavy chain V region
EVQLVESGAEVKKPGSSVKVSCKASGGTFSSYAISWVRQAPGQGLEWMGGIIPIFGTANYAQKFQGRVTITADESTSTAYMELSSLRSEDTAVYYCARAPYYYYYMDVWGQGTTVTVSS

SEQ ID NO: 7338 - protein, 7 aa, synthetic construct
  REGION 1..7: note = socazolimab heavy chain CDR1
GGTFSSY

SEQ ID NO: 7339 - protein, 8 aa, synthetic construct
  REGION 1..8: note = socazolimab heavy chain CDR2
IIPIFGTA

SEQ ID NO: 7340 - protein, 12 aa, synthetic construct
  REGION 1..12: note = socazolimab heavy chain CDR3
ARAPYYYYYMDV

SEQ ID NO: 7341 - protein, 109 aa, synthetic construct
  REGION 1..109: note = socazolimab light chain V region
QSALTQPASVSGSLGQSVTISCTGSSSDVGSYNLVSWYQQHPGKAPNLMIYDVSKRSGVSNRFSGSKSGNTASLTISGLQAEDEADYYCSSYTGISTVVFGGGTKLTVL

SEQ ID NO: 7342 - protein, 9 aa, synthetic construct
  REGION 1..9: note = socazolimab light chain CDR1
SSDVGSYNL

SEQ ID NO: 7343 - skipped

SEQ ID NO: 7344 - protein, 10 aa, synthetic construct
  REGION 1..10: note = socazolimab light chain CDR3
SSYTGISTVV

SEQ ID NO: 7345 - protein, 123 aa, synthetic construct
  REGION 1..123: note = sonelokimab heavy chain 1 V region
DVQLVESGGGLVQPGGSLRLSCAASGRTFSSYVVGWFRQAPGKEREFIGAISGSGESIYYAVSEKGRFTISRDNSKNTLYLQMNSLRPEDTAVYYCTADQEFGYLRFGRSEYWGQGTLVTVSS

SEQ ID NO: 7346 - protein, 7 aa, synthetic construct
  REGION 1..7: note = sonelokimab heavy chain 1 CDR1
GRTFSSY

SEQ ID NO: 7347 - protein, 8 aa, synthetic construct
  REGION 1..8: note = sonelokimab heavy chain 1 CDR2
ISGSGESI

SEQ ID NO: 7348 - protein, 16 aa, synthetic construct
  REGION 1..16: note = sonelokimab heavy chain 1 CDR3
TADQEFGYLRFGRSEY

SEQ ID NO: 7349 - protein, 115 aa, synthetic construct [sequence omitted]

SEQ ID NO: 7350 - protein, 7 aa, synthetic construct
  REGION 1..7: note = sonelokimab heavy chain 2 CDR1
GFTFSSF

SEQ ID NO: 7351 - protein, 8 aa, synthetic construct
  REGION 1..8: note = sonelokimab heavy chain 2 CDR2
ISGSGSDT

SEQ ID NO: 7352 - protein, 13 aa, synthetic construct
  REGION 1..13: note = sonelokimab heavy chain 2 CDR3
TIGGSLSRSSQGT

SEQ ID NO: 7353 - protein, 122 aa, synthetic construct
  REGION 1..122: note = sonelokimab heavy chain 3 V region
EVQLVESGGGLVQPGGSLRLSCAASGRTYDAMGWLRQAPGKEREFVAAISGSGDDTYYADSVKGRFTISRDNSKNTLYLQMNSLRPEDTAVYYCATRRGLYYVWDANDYENWGQGTLVTVSS

SEQ ID NO: 7354 - protein, 6 aa, synthetic construct
  REGION 1..6: note = sonelokimab heavy chain 3 CDR1
GRTYDA

SEQ ID NO: 7355 - protein, 8 aa, synthetic construct
  REGION 1..8: note = sonelokimab heavy chain 3 CDR2
ISGSGDDT

SEQ ID NO: 7356 - protein, 16 aa, synthetic construct
  REGION 1..16: note = sonelokimab heavy chain 3 CDR3
ATRRGLYYVWDANDYE

SEQ ID NO: 7357 - protein, 127 aa, synthetic construct; identical to SEQ ID NO: 456
  REGION 1..127: note = sotrovimab heavy chain V region

SEQ ID NO: 7358 - protein, 8 aa, synthetic construct
  REGION 1..8: note = sotrovimab heavy chain CDR1
GYPFTSYG

SEQ ID NO: 7359 - protein, 8 aa, synthetic construct
  REGION 1..8: note = sotrovimab heavy chain CDR2
ISTYQGNT

SEQ ID NO: 7360 - protein, 20 aa, synthetic construct
  REGION 1..20: note = sotrovimab heavy chain CDR3
ARDYTRGAWFGESLIGGFDN

SEQ ID NO: 7361 - protein, 107 aa, synthetic construct [sequence omitted]

SEQ ID NO: 7362 - protein, 7 aa, synthetic construct
  REGION 1..7: note = sotrovimab light chain CDR1
QTVSSTS

SEQ ID NO: 7363 - skipped

SEQ ID NO: 7364 - protein, 8 aa, synthetic construct
  REGION 1..8: note = sotrovimab light chain CDR3
QQHDTSLT

SEQ ID NO: 7365 - protein, 118 aa, synthetic construct [sequence omitted]

SEQ ID NO: 7366 - protein, 8 aa, synthetic construct
  REGION 1..8: note = sudubrilimab heavy chain CDR1
GFTFSETW

SEQ ID NO: 7367 - protein, 8 aa, synthetic construct
  REGION 1..8: note = sudubrilimab heavy chain CDR2
VSPFGGST

SEQ ID NO: 7368 - protein, 11 aa, synthetic construct
  REGION 1..11: note = sudubrilimab heavy chain CDR3
ARRHWPGGFDY

SEQ ID NO: 7369 - protein, 107 aa, synthetic construct [sequence omitted]

SEQ ID NO: 7370 - protein, 6 aa, synthetic construct
  REGION 1..6: note = sudubrilimab light chain CDR1
QDVSTA

SEQ ID NO: 7371 - skipped

SEQ ID NO: 7372 - protein, 9 aa, synthetic construct
  REGION 1..9: note = sudubrilimab light chain CDR3
QQFLYHPAT

SEQ ID NO: 7373 - protein, 121 aa, synthetic construct
  REGION 1..121: note = sugemalimab heavy chain V region
EVQLLESGGGLVQPGGSLRLSCAASGFTFSSYAMSWVRQAPGKGLEWVSGISGSGGFTYYADSVKGRFTISRDNSKNTLYLQMNSLRAEDTAVYYCAKPPRGYNYGPFDYWGQGTLVTVSS

SEQ ID NO: 7374 - protein, 7 aa, synthetic construct
  REGION 1..7: note = sugemalimab heavy chain CDR1
GFTFSSY

SEQ ID NO: 7375 - protein, 8 aa, synthetic construct
  REGION 1..8: note = sugemalimab heavy chain CDR2
ISGSGGFT

SEQ ID NO: 7376 - protein, 14 aa, synthetic construct
  REGION 1..14: note = sugemalimab heavy chain CDR3
AKPPRGYNYGPFDY

SEQ ID NO: 7377 - protein, 108 aa, synthetic construct
  REGION 1..108: note = sugemalimab light chain V region
SYVLTQPPSVSVAPGQTARITCGGNNIGSKSVHWYQQKPGQAPVLVVYDDSDRPSGIPERFSGSNSGNTATLTISRVEAGDEADYYCQVWDSSSDHVVFGGGTKLTVL

SEQ ID NO: 7378 - protein, 6 aa, synthetic construct
  REGION 1..6: note = sugemalimab light chain CDR1
NIGSKS

SEQ ID NO: 7379 - skipped

SEQ ID NO: 7380 - protein, 11 aa, synthetic construct
  REGION 1..11: note = sugemalimab light chain CDR3
QVWDSSSDHVV

SEQ ID NO: 7381 - protein, 123 aa, synthetic construct
  REGION 1..123: note = suptavumab heavy chain V region
EVQLVESGGDLVQPGRSLRLSCVASGFTFDDYAMHWVRQAPGKGLEWVSGVSWSGSTVGYADSVKGRFTVSRDNAQKSLYLQMNSLRAEDTALYYCVKDAYKFNYYYYGLDVWGQGTTVTVSS

SEQ ID NO: 7382 - protein, 8 aa, synthetic construct
  REGION 1..8: note = suptavumab heavy chain CDR1
GFTFDDYA

SEQ ID NO: 7383 - protein, 8 aa, synthetic construct
  REGION 1..8: note = suptavumab heavy chain CDR2
VSWSGSTV

SEQ ID NO: 7384 - protein, 16 aa, synthetic construct
  REGION 1..16: note = suptavumab heavy chain CDR3
VKDAYKFNYYYYGLDV

SEQ ID NO: 7385 - protein, 107 aa, synthetic construct
  REGION 1..107: note = suptavumab light chain V region
EIVMTQSPATLSVSPGERATLSCRASQTILSNLAWYLQKPGQAPRLLIYGASTRATGLPARFSGSGSGTEFTLTISSLQSEDFAVYYCQQYNNWPLTFGGGTKVEIK

SEQ ID NO: 7386 - protein, 6 aa, synthetic construct
  REGION 1..6: note = suptavumab light chain CDR1
QTILSN

SEQ ID NO: 7387 - skipped

SEQ ID NO: 7388 - protein, 9 aa, synthetic construct
  REGION 1..9: note = suptavumab light chain CDR3
QQYNNWPLT

SEQ ID NO: 7389 - protein, 119 aa, synthetic construct
  REGION 1..119: note = surzebiclimab heavy chain V region
EVQLVESGGGLVQPGGSLRLSCAASGFTFSRYAMSWVRQAPGKGLEWVAAISSGGSLYYPDSVKGRFTISRDNAKNTLYLQMNSLRAEDTAVYYCARGREADGGYFDYWGQGTLVTVSS

SEQ ID NO: 7390 - protein, 7 aa, synthetic construct
  REGION 1..7: note = surzebiclimab heavy chain CDR1
GFTFSRY

SEQ ID NO: 7391 - protein, 7 aa, synthetic construct
  REGION 1..7: note = surzebiclimab heavy chain CDR2
ISSGGSL

SEQ ID NO: 7392 - protein, 13 aa, synthetic construct
  REGION 1..13: note = surzebiclimab heavy chain CDR3
ARGREADGGYFDY

SEQ ID NO: 7393 - protein, 111 aa, synthetic construct
  REGION 1..111: note = surzebiclimab light chain V region
EIVLTQSPATLSVSPGERATLSCRASESVEYYGTSLMQWYQQKPGQAPRLLIYAASNVESGIPARFSGSGSGTEFTLTISSLQSEDFAVYYCQQSLKVPLTFGGGTKVEIK

SEQ ID NO: 7394 - protein, 10 aa, synthetic construct
  REGION 1..10: note = surzebiclimab light chain CDR1
ESVEYYGTSL

SEQ ID NO: 7395 - skipped

SEQ ID NO: 7396 - protein, 9 aa, synthetic construct
  REGION 1..9: note = surzebiclimab light chain CDR3
QQSLKVPLT

SEQ ID NO: 7397 - protein, 122 aa, synthetic construct
  REGION 1..122: note = suvratoxumab heavy chain V region
EVQLVESGGGLVQPGGSLRLSCAASGFTFSSHDMHWVRQATGKGLEWVSGIGTAGDTYYPDSVKGRFTISRENAKNSLYLQMNSLRAGDTAVYYCARDRYSPTGHYYGMDVWGQGTTVTVSS

SEQ ID NO: 7398 - protein, 8 aa, synthetic construct
  REGION 1..8: note = suvratoxumab heavy chain CDR1
GFTFSSHD

SEQ ID NO: 7399 - protein, 7 aa, synthetic construct
  REGION 1..7: note = suvratoxumab heavy chain CDR2
IGTAGDT

SEQ ID NO: 7400 - protein, 16 aa, synthetic construct
  REGION 1..16: note = suvratoxumab heavy chain CDR3
ARDRYSPTGHYYGMDV

SEQ ID NO: 7401 - protein, 106 aa, synthetic construct
  REGION 1..106: note = suvratoxumab light chain V region
DIQMTQSPSTLSASVGDRVTITCRASQSISSWLAWYQQKPGKAPKLLIYKASSLESGVPSRFSGSGSGTEFTLTISSLQPDDFATYYCKQYADYWTFGQGTKVEIK

SEQ ID NO: 7402 - protein, 6 aa, synthetic construct
  REGION 1..6: note = suvratoxumab light chain CDR1
QSISSW

SEQ ID NO: 7403 - skipped

SEQ ID NO: 7404 - protein, 8 aa, synthetic construct
  REGION 1..8: note = suvratoxumab light chain CDR3
KQYADYWT

SEQ ID NO: 7405 - protein, 123 aa, synthetic construct [sequence omitted]

SEQ ID NO: 7406 - protein, 8 aa, synthetic construct
  REGION 1..8: note = tabalumab heavy chain CDR1
GGSFSGYY

SEQ ID NO: 7407 - protein, 7 aa, synthetic construct
  REGION 1..7: note = tabalumab heavy chain CDR2
INHSGST

SEQ ID NO: 7408 - protein, 17 aa, synthetic construct
  REGION 1..17: note = tabalumab heavy chain CDR3
ARGYYDILTGYYYYFDY

SEQ ID NO: 7409 - protein, 107 aa, synthetic construct [sequence omitted]

SEQ ID NO: 7410 - protein, 6 aa, synthetic construct
  REGION 1..6: note = tabalumab light chain CDR1
QSVSRY

SEQ ID NO: 7411 - skipped

SEQ ID NO: 7412 - protein, 9 aa, synthetic construct
  REGION 1..9: note = tabalumab light chain CDR3
QQRSNWPRT

SEQ ID NO: 7413 - protein, 118 aa, synthetic construct
  REGION 1..118: note = tabituximab heavy chain V region
EVQLQQSGAELVKPGASVKLSCTASGFNINDTYMHWVKQRPEQGLEWIGRIDPANGNTKYDPKFQGKATITADTSSNTAYLQLSSLTSEDTAVYYCARGARGSRFAYWGQGTLVTVSA

SEQ ID NO: 7414 - protein, 8 aa, synthetic construct
  REGION 1..8: note = tabituximab heavy chain CDR1
GFNINDTY

SEQ ID NO: 7415 - protein, 8 aa, synthetic construct
  REGION 1..8: note = tabituximab heavy chain CDR2
IDPANGNT

SEQ ID NO: 7416 - protein, 11 aa, synthetic construct
  REGION 1..11: note = tabituximab heavy chain CDR3
ARGARGSRFAY

SEQ ID NO: 7417 - protein, 107 aa, synthetic construct
  REGION 1..107: note = tabituximab light chain V region
DIQMTQSPASLSVSVGETVTITCRASENIYSNLAWYQQKQGKSPQLLVYVATNLADGVPSRFSGSGSGTQYSLKINSLQSEDFGSYYCQHFWGTPYTFGGGTKLEIK

SEQ ID NO: 7418 - protein, 6 aa, synthetic construct
  REGION 1..6: note = tabituximab light chain CDR1
ENIYSN

SEQ ID NO: 7419 - skipped

SEQ ID NO: 7420 - protein, 9 aa, synthetic construct
  REGION 1..9: note = tabituximab light chain CDR3
QHFWGTPYT

SEQ ID NO: 7421 - protein, 118 aa, synthetic construct; identical to SEQ ID NO: 7413
  REGION 1..118: note = tabituximab barzuxetan heavy chain V region

SEQ ID NO: 7422 - protein, 8 aa, synthetic construct
  REGION 1..8: note = tabituximab barzuxetan heavy chain CDR1
GFNINDTY

SEQ ID NO: 7423 - protein, 8 aa, synthetic construct
  REGION 1..8: note = tabituximab barzuxetan heavy chain CDR2
IDPANGNT

SEQ ID NO: 7424 - protein, 11 aa, synthetic construct
  REGION 1..11: note = tabituximab barzuxetan heavy chain CDR3
ARGARGSRFAY

SEQ ID NO: 7425 - protein, 107 aa, synthetic construct; identical to SEQ ID NO: 7417
  REGION 1..107: note = tabituximab barzuxetan light chain V region

SEQ ID NO: 7426 - protein, 6 aa, synthetic construct
  REGION 1..6: note = tabituximab barzuxetan light chain CDR1
ENIYSN

SEQ ID NO: 7427 - skipped

SEQ ID NO: 7428 - protein, 9 aa, synthetic construct
  REGION 1..9: note = tabituximab barzuxetan light chain CDR3
QHFWGTPYT

SEQ ID NO: 7429 - protein, 121 aa, synthetic construct
  REGION 1..121: note = tafasitamab heavy chain V region
EVQLVESGGGLVKPGGSLKLSCAASGYTFTSYVMHWVRQAPGKGLEWIGYINPYNDGTKYNEKFQGRVTISSDKSISTAYMELSSLRSEDTAMYYCARGTYYYGTRVFDYWGQGTLVTVSS

SEQ ID NO: 7430 - protein, 8 aa, synthetic construct
  REGION 1..8: note = tafasitamab heavy chain CDR1
GYTFTSYV

SEQ ID NO: 7431 - protein, 8 aa, synthetic construct
  REGION 1..8: note = tafasitamab heavy chain CDR2
INPYNDGT

SEQ ID NO: 7432 - protein, 14 aa, synthetic construct
  REGION 1..14: note = tafasitamab heavy chain CDR3
ARGTYYYGTRVFDY

SEQ ID NO: 7433 - protein, 112 aa, synthetic construct
  REGION 1..112: note = tafasitamab light chain V region
DIVMTQSPATLSLSPGERATLSCRSSKSLQNVNGNTYLYWFQQKPGQSPQLLIYRMSNLNSGVPDRFSGSGSGTEFTLTISSLEPEDFAVYYCMQHLEYPITFGAGTKLEIK

SEQ ID NO: 7434 - protein, 11 aa, synthetic construct
  REGION 1..11: note = tafasitamab light chain CDR1
KSLQNVNGNTY

SEQ ID NO: 7435 - skipped

SEQ ID NO: 7436 - protein, 9 aa, synthetic construct
  REGION 1..9: note = tafasitamab light chain CDR3
MQHLEYPIT

SEQ ID NO: 7437 - protein, 126 aa, synthetic construct
  REGION 1..126: note = tafolecimab heavy chain V region
QLQLQESGPGLVKPSETLSLTCTVSGGSISSASYYWSWIRQPPGKGLEWIGSINYRGSTYYNPSLKSRVTISVDTSKNQFSLKLSSVTAADTAVYYCARENSGVVPAAGPNWFGPWGQGTLVTVSS

SEQ ID NO: 7438 - protein, 10 aa, synthetic construct
  REGION 1..10: note = tafolecimab heavy chain CDR1
GGSISSASYY

SEQ ID NO: 7439 - protein, 7 aa, synthetic construct
  REGION 1..7: note = tafolecimab heavy chain CDR2
INYRGST

SEQ ID NO: 7440 - protein, 18 aa, synthetic construct
  REGION 1..18: note = tafolecimab heavy chain CDR3
ARENSGVVPAAGPNWFGP

SEQ ID NO: 7441 - protein, 106 aa, synthetic construct
  REGION 1..106: note = tafolecimab light chain V region
EIVLTQSPATLSLSPGERATLSCRASQSVSSYLAWYQQKPGQAPRLLIYDASNRATGIPARFSGSGSGTDFTLTISSLEPEDFAVYYCQQRRNWFTFGGGTKVEIK

SEQ ID NO: 7442 - protein, 6 aa, synthetic construct
  REGION 1..6: note = tafolecimab light chain CDR1
QSVSSY

SEQ ID NO: 7443 - skipped

SEQ ID NO: 7444 - protein, 8 aa, synthetic construct
  REGION 1..8: note = tafolecimab light chain CDR3
QQRRNWFT

SEQ ID NO: 7445 - protein, 120 aa, synthetic construct
  REGION 1..120: note = tagitanlimab heavy chain V region
QVQLQESGPGLVKPSETLSITCTVSGFSLSNYDISWIRQPPGKGLEWLGVIWTGGATNYNPALKSRLTISRDNSKNQVSLKMSSVTAADTAVYYCVRDSNYRYDEPFTYWGQGTLVTVSS

SEQ ID NO: 7446 - protein, 8 aa, synthetic construct
  REGION 1..8: note = tagitanlimab heavy chain CDR1
GFSLSNYD

SEQ ID NO: 7447 - protein, 7 aa, synthetic construct
  REGION 1..7: note = tagitanlimab heavy chain CDR2
IWTGGAT

SEQ ID NO: 7448 - protein, 14 aa, synthetic construct
  REGION 1..14: note = tagitanlimab heavy chain CDR3
VRDSNYRYDEPFTY

SEQ ID NO: 7449 - protein, 107 aa, synthetic construct
  REGION 1..107: note = tagitanlimab light chain V region
EIVLTQSPDTLSVTPKEKVTLTCRASQSIGTNIHWFQQKPGQSPKLLIKYASESISGVPSRFSGSGSGTDFTLTINSVEAEDAATYYCQQSNSWPYTFGQGTKLEIK

SEQ ID NO: 7450 - protein, 6 aa, synthetic construct
  REGION 1..6: note = tagitanlimab light chain CDR1
QSIGTN

SEQ ID NO: 7451 - skipped

SEQ ID NO: 7452 - protein, 9 aa, synthetic construct
  REGION 1..9: note = tagitanlimab light chain CDR3
QQSNSWPYT

SEQ ID NO: 7453 - protein, 122 aa, synthetic construct
  REGION 1..122: note = tamgiblimab heavy chain V region
QVQLVQSGAEVKKPGASVKVSCKASGYTFTEYYMHWVRQAPGQGLEWMGIISPSAGSTKYAQKFQGRVTMTRDTSTSTVYMELSSLRSEDTAVYYCARDHDIRLAGRLADYWGQGTLVTVSS

SEQ ID NO: 7454 - protein, 8 aa, synthetic construct
  REGION 1..8: note = tamgiblimab heavy chain CDR1
GYTFTEYY

SEQ ID NO: 7455 - protein, 9 aa, synthetic construct
  REGION 1..9: note = tamgiblimab heavy chain CDR2
ISPSAGSTK

SEQ ID NO: 7456 - protein, 15 aa, synthetic construct
  REGION 1..15: note = tamgiblimab heavy chain CDR3
ARDHDIRLAGRLADY

SEQ ID NO: 7457 - protein, 107 aa, synthetic construct
  REGION 1..107: note = tamgiblimab light chain V region
DIQMTQSPSSVSASVGDRVTITCRASQGISSWLAWYQQKPGKAPKLLISAASSLQSGVPSRFSGSGSGTDFTLTISSLQPEDFATYYCQQAVILPITFGGGTKVEIK

SEQ ID NO: 7458 - protein, 6 aa, synthetic construct
  REGION 1..6: note = tamgiblimab light chain CDR1
QGISSW

SEQ ID NO: 7459 - skipped

SEQ ID NO: 7460 - protein, 9 aa, synthetic construct
  REGION 1..9: note = tamgiblimab light chain CDR3
QQAVILPIT

SEQ ID NO: 7461 - protein, 115 aa, synthetic construct
  REGION 1..115: note = tarextumab heavy chain V region
EVQLVESGGGLVQPGGSLRLSCAASGFTFSSSGMSWVRQAPGKGLEWVSVIASSGSNTYYADSVKGRFTISRDNSKNTLYLQMNSLRAEDTAVYYCARSIFYTTWGQGTLVTVSS

SEQ ID NO: 7462 - protein, 8 aa, synthetic construct
  REGION 1..8: note = tarextumab heavy chain CDR1
GFTFSSSG

SEQ ID NO: 7463 - protein, 8 aa, synthetic construct
  REGION 1..8: note = tarextumab heavy chain CDR2
IASSGSNT

SEQ ID NO: 7464 - protein, 8 aa, synthetic construct
  REGION 1..8: note = tarextumab heavy chain CDR3
ARSIFYTT

SEQ ID NO: 7465 - protein, 108 aa, synthetic construct
  REGION 1..108: note = tarextumab light chain V region
DIVLTQSPATLSLSPGERATLSCRASQSVRSNYLAWYQQKPGQAPRLLIYGASSRATGVPARFSGSGSGTDFTLTISSLEPEDFAVYYCQQYSNFPITFGQGTKVEIK

SEQ ID NO: 7466 - protein, 7 aa, synthetic construct
  REGION 1..7: note = tarextumab light chain CDR1
QSVRSNY

SEQ ID NO: 7467 - skipped

SEQ ID NO: 7468 - protein, 9 aa, synthetic construct
  REGION 1..9: note = tarextumab light chain CDR3
QQYSNFPIT

SEQ ID NO: 7469 - protein, 118 aa, synthetic construct
  REGION 1..118: note = teprotumumab heavy chain V region
QVELVESGGGVVQPGRSQRLSCAASGFTFSSYGMHWVRQAPGKGLEWVAIIWFDGSSTYYADSVRGRFTISRDNSKNTLYLQMNSLRAEDTAVYFCARELGRRYFDLWGRGTLVSVSS

SEQ ID NO: 7470 - protein, 7 aa, synthetic construct
  REGION 1..7: note = teprotumumab heavy chain CDR1
GFTFSSY

SEQ ID NO: 7471 - protein, 8 aa, synthetic construct
  REGION 1..8: note = teprotumumab heavy chain CDR2
IWFDGSST

SEQ ID NO: 7472 - protein, 11 aa, synthetic construct
  REGION 1..11: note = teprotumumab heavy chain CDR3
ARELGRRYFDL

SEQ ID NO: 7473 - protein, 108 aa, synthetic construct
  REGION 1..108: note = teprotumumab light chain V region
EIVLTQSPATLSLSPGERATLSCRASQSVSSYLAWYQQKPGQAPRLLIYDASKRATGIPARFSGSGSGTDFTLTISSLEPEDFAVYYCQQRSKWPPWTFGQGTKVESK

SEQ ID NO: 7474 - protein, 6 aa, synthetic construct
  REGION 1..6: note = teprotumumab light chain CDR1
QSVSSY

SEQ ID NO: 7475 - skipped

SEQ ID NO: 7476 - protein, 10 aa, synthetic construct
  REGION 1..10: note = teprotumumab light chain CDR3
QQRSKWPPWT

SEQ ID NO: 7477 - protein, 116 aa, synthetic construct
  REGION 1..116: note = tesidolumab heavy chain V region
EVQLVQSGAEVKKPGSSVKVSCKASGGTFSSYAISWVRQAPGQGLEWMGGIGPFFGTANYAQKFQGRVTITADESTSTAYMELSSLRSEDTAVYYCARDTPYFDYWGQGTLVTVSS

SEQ ID NO: 7478 - protein, 8 aa, synthetic construct
  REGION 1..8: note = tesidolumab heavy chain CDR1
GGTFSSYA

SEQ ID NO: 7479 - protein, 8 aa, synthetic construct
  REGION 1..8: note = tesidolumab heavy chain CDR2
IGPFFGTA

SEQ ID NO: 7480 - protein, 9 aa, synthetic construct
  REGION 1..9: note = tesidolumab heavy chain CDR3
ARDTPYFDY

SEQ ID NO: 7481 - protein, 108 aa, synthetic construct
  REGION 1..108: note = tesidolumab light chain V region
SYELTQPLSVSVALGQTARITCSGDSIPNYYVYWYQQKPGQAPVLVIYDDSNRPSGIPERFSGSNSGNTATLTISRAQAGDEADYYCQSFDSSLNAEVFGGGTKLTVL

SEQ ID NO: 7482 - protein, 6 aa, synthetic construct
  REGION 1..6: note = tesidolumab light chain CDR1
SIPNYY

SEQ ID NO: 7483 - skipped

SEQ ID NO: 7484 - protein, 11 aa, synthetic construct
  REGION 1..11: note = tesidolumab light chain CDR3
QSFDSSLNAEV

SEQ ID NO: 7485 - protein, 115 aa, synthetic construct
  REGION 1..115: note = tesnatilimab heavy chain V region
QVHLQESGPGLVKPSETLSLTCTVSDDSISSYYWSWIRQPPGKGLEWIGHISYSGSANYNPSLKSRVTISVDTSKNQFSLKLSSVTAADTAVYYCANWDDAFNIWGQGTMVTVSS

SEQ ID NO: 7486 - protein, 8 aa, synthetic construct
  REGION 1..8: note = tesnatilimab heavy chain CDR1
DDSISSYY

SEQ ID NO: 7487 - protein, 7 aa, synthetic construct
  REGION 1..7: note = tesnatilimab heavy chain CDR2
ISYSGSA

SEQ ID NO: 7488 - protein, 9 aa, synthetic construct
  REGION 1..9: note = tesnatilimab heavy chain CDR3
ANWDDAFNI

SEQ ID NO: 7489 - protein, 108 aa, synthetic construct
  REGION 1..108: note = tesnatilimab light chain V region
EIVLTQSPGTLSLSPGERATLSCRASQSVSSSYLAWYQQKPGQAPRLLIYGASSRATGIPDRFSGSGSGTDFTLTISRLEPEDFAVYYCQQYGSSPWTFGQGTKVEIK

SEQ ID NO: 7490 - protein, 7 aa, synthetic construct
  REGION 1..7: note = tesnatilimab light chain CDR1
QSVSSSY

SEQ ID NO: 7491 - skipped

SEQ ID NO: 7492 - protein, 9 aa, synthetic construct
  REGION 1..9: note = tesnatilimab light chain CDR3
QQYGSSPWT

SEQ ID NO: 7493 - protein, 122 aa, synthetic construct
  REGION 1..122: note = tezepelumab heavy chain V region
QMQLVESGGGVVQPGRSLRLSCAASGFTFRTYGMHWVRQAPGKGLEWVAVIWYDGSNKHYADSVKGRFTITRDNSKNTLNLQMNSLRAEDTAVYYCARAPQWELVHEAFDIWGQGTMVTVSS

SEQ ID NO: 7494 - protein, 8 aa, synthetic construct
  REGION 1..8: note = tezepelumab heavy chain CDR1
GFTFRTYG

SEQ ID NO: 7495 - protein, 8 aa, synthetic construct
  REGION 1..8: note = tezepelumab heavy chain CDR2
IWYDGSNK

SEQ ID NO: 7496 - protein, 15 aa, synthetic construct
  REGION 1..15: note = tezepelumab heavy chain CDR3
ARAPQWELVHEAFDI

SEQ ID NO: 7497 - protein, 108 aa, synthetic construct
  REGION 1..108: note = tezepelumab light chain V region
SYVLTQPPSVSVAPGQTARITCGGNNLGSKSVHWYQQKPGQAPVLVVYDDSDRPSWIPERFSGSNSGNTATLTISRGEAGDEADYYCQVWDSSSDHVVFGGGTKLTVL

SEQ ID NO: 7498 - protein, 6 aa, synthetic construct
  REGION 1..6: note = tezepelumab light chain CDR1
NLGSKS

SEQ ID NO: 7499 - skipped

SEQ ID NO: 7500 - protein, 11 aa, synthetic construct
  REGION 1..11: note = tezepelumab light chain CDR3
QVWDSSSDHVV

SEQ ID NO: 7501 - protein, 117 aa, synthetic construct
  REGION 1..117: note = timolumab heavy chain V region
QVQLVESGGGVVQPGRSLRLSCAASGFTFFSYAMHWVRQTPGKGLEWVAVIWFDGSNENYVDSVKGRFTISRDNSKNTLYLQMNTLRAEDTAVYYCARDAWSYFDYWGQGTLVTVSS

SEQ ID NO: 7502 - protein, 7 aa, synthetic construct
  REGION 1..7: note = timolumab heavy chain CDR1
GFTFFSY

SEQ ID NO: 7503 - protein, 8 aa, synthetic construct
  REGION 1..8: note = timolumab heavy chain CDR2
IWFDGSNE

SEQ ID NO: 7504 - protein, 10 aa, synthetic construct
  REGION 1..10: note = timolumab heavy chain CDR3
ARDAWSYFDY

SEQ ID NO: 7505 - protein, 107 aa, synthetic construct
  REGION 1..107: note = timolumab light chain V region
VIQLTQSPSSLSASVGDRVTITCRASQGISRALAWYQQKPGKGPKLLIYDASSLESGVPSRFSGSGSGTDFTLTISSLQPEDFATYYCQQFNSYPLTFGGGTKVEIK

SEQ ID NO: 7506 - protein, 6 aa, synthetic construct
  REGION 1..6: note = timolumab light chain CDR1
QGISRA

SEQ ID NO: 7507 - skipped

SEQ ID NO: 7508 - protein, 9 aa, synthetic construct
  REGION 1..9: note = timolumab light chain CDR3
QQFNSYPLT

SEQ ID NO: 7509 - protein, 126 aa, synthetic construct
  REGION 1..126: note = tiragolumab heavy chain V region
EVQLQQSGPGLVKPSQTLSLTCAISGDSVSSNSAAWNWIRQSPSRGLEWLGKTYYRFKWYSDYAVSVKGRITINPDTSKNQFSLQLNSVTPEDTAVFYCTRESTTYDLLAGPFDYWGQGTLVTVSS

SEQ ID NO: 7510 - protein, 10 aa, synthetic construct
  REGION 1..10: note = tiragolumab heavy chain CDR1
GDSVSSNSAA

SEQ ID NO: 7511 - protein, 9 aa, synthetic construct
  REGION 1..9: note = tiragolumab heavy chain CDR2
TYYRFKWYS

SEQ ID NO: 7512 - protein, 16 aa, synthetic construct
  REGION 1..16: note = tiragolumab heavy chain CDR3
TRESTTYDLLAGPFDY

SEQ ID NO: 7513 - protein, 113 aa, synthetic construct
  REGION 1..113: note = tiragolumab light chain V region
DIVMTQSPDSLAVSLGERATINCKSSQTVLYSSNNKKYLAWYQQKPGQPPNLLIYWASTRESGVPDRFSGSGSGTDFTLTISSLQAEDVAVYYCQQYYSTPFTFGPGTKVEIK

SEQ ID NO: 7514 - protein, 12 aa, synthetic construct
  REGION 1..12: note = tiragolumab light chain CDR1
QTVLYSSNNKKY

SEQ ID NO: 7515 - skipped

SEQ ID NO: 7516 - protein, 9 aa, synthetic construct
  REGION 1..9: note = tiragolumab light chain CDR3
QQYYSTPFT

SEQ ID NO: 7517 - protein, 118 aa, synthetic construct
  REGION 1..118: note = tisotumab heavy chain V region
EVQLLESGGGLVQPGGSLRLSCAASGFTFSNYAMSWVRQAPGKGLEWVSSISGSGDYTYYTDSVKGRFTISRDNSKNTLYLQMNSLRAEDTAVYYCARSPWGYYLDSWGQGTLVTVSS

SEQ ID NO: 7518 - protein, 7 aa, synthetic construct
  REGION 1..7: note = tisotumab heavy chain CDR1
GFTFSNY

SEQ ID NO: 7519 - protein, 8 aa, synthetic construct
  REGION 1..8: note = tisotumab heavy chain CDR2
ISGSGDYT

SEQ ID NO: 7520 - protein, 11 aa, synthetic construct
  REGION 1..11: note = tisotumab heavy chain CDR3
ARSPWGYYLDS

SEQ ID NO: 7521 - protein, 107 aa, synthetic construct
  REGION 1..107: note = tisotumab light chain V region
DIQMTQSPPSLSASAGDRVTITCRASQGISSRLAWYQQKPEKAPKSLIYAASSLQSGVPSRFSGSGSGTDFTLTISSLQPEDFATYYCQQYNSYPYTFGQGTKLEIK

SEQ ID NO: 7522 - protein, 6 aa, synthetic construct
  REGION 1..6: note = tisotumab light chain CDR1
QGISSR

SEQ ID NO: 7523 - skipped

SEQ ID NO: 7524 - protein, 9 aa, synthetic construct
  REGION 1..9: note = tisotumab light chain CDR3
QQYNSYPYT

SEQ ID NO: 7525 - protein, 118 aa, synthetic construct; identical to SEQ ID NO: 7517
  REGION 1..118: note = tisotumab vedotin heavy chain V region

SEQ ID NO: 7526 - protein, 8 aa, synthetic construct
  REGION 1..8: note = tisotumab vedotin heavy chain CDR1
GFTFSNYA

SEQ ID NO: 7527 - protein, 8 aa, synthetic construct
  REGION 1..8: note = tisotumab vedotin heavy chain CDR2
ISGSGDYT

SEQ ID NO: 7528 - protein, 11 aa, synthetic construct
  REGION 1..11: note = tisotumab vedotin heavy chain CDR3
ARSPWGYYLDS

SEQ ID NO: 7529 - protein, 107 aa, synthetic construct; identical to SEQ ID NO: 7521
  REGION 1..107: note = tisotumab vedotin light chain V region

SEQ ID NO: 7530 - protein, 6 aa, synthetic construct
  REGION 1..6: note = tisotumab vedotin light chain CDR1
QGISSR

SEQ ID NO: 7531 - skipped

SEQ ID NO: 7532 - protein, 9 aa, synthetic construct
  REGION 1..9: note = tisotumab vedotin light chain CDR3
QQYNSYPYT

SEQ ID NO: 7533 - protein, 123 aa, synthetic construct; identical to SEQ ID NO: 452
  REGION 1..123: note = tixavimab heavy chain V region

SEQ ID NO: 7534 - protein, 8 aa, synthetic construct
  REGION 1..8: note = tixavimab heavy chain CDR1
GFTFMSSA

SEQ ID NO: 7535 - protein, 8 aa, synthetic construct
  REGION 1..8: note = tixavimab heavy chain CDR2
IVIGSGNT

SEQ ID NO: 7536 - protein, 16 aa, synthetic construct
  REGION 1..16: note = tixavimab heavy chain CDR3
AAPYCSSISCNDGFDI

SEQ ID NO: 7537 - protein, 109 aa, synthetic construct; identical to SEQ ID NO: 451
  REGION 1..109: note = tixavimab light chain V region

SEQ ID NO: 7538 - protein, 7 aa, synthetic construct
  REGION 1..7: note = tixavimab light chain CDR1
QSVSSSY

SEQ ID NO: 7539 - skipped

SEQ ID NO: 7540 - protein, 10 aa, synthetic construct
  REGION 1..10: note = tixavimab light chain CDR3
QHYGSSRGWT

SEQ ID NO: 7541 - protein, 119 aa, synthetic construct [sequence omitted]

SEQ ID NO: 7542 - protein, 9 aa, synthetic construct
  REGION 1..9: note = tocilizumab heavy chain CDR1
GYSITSDHA

SEQ ID NO: 7543 - protein, 7 aa, synthetic construct
  REGION 1..7: note = tocilizumab heavy chain CDR2
ISYSGIT

SEQ ID NO: 7544 - protein, 12 aa, synthetic construct
  REGION 1..12: note = tocilizumab heavy chain CDR3
ARSLARTTAMDY

SEQ ID NO: 7545 - protein, 107 aa, synthetic construct [sequence omitted]

SEQ ID NO: 7546 - protein, 6 aa, synthetic construct
  REGION 1..6: note = tocilizumab light chain CDR1
QDISSY

SEQ ID NO: 7547 - skipped

SEQ ID NO: 7548 - protein, 9 aa, synthetic construct
  REGION 1..9: note = tocilizumab light chain CDR3
QQGNTLPYT

SEQ ID NO: 7549 - protein, 121 aa, synthetic construct
  REGION 1..121: note = tosatoxumab heavy chain V region
EVQMVQSGAEVKKPGEPLKISCKGSGYKFGTHWIGWVRQRPGKGLEWMGIIHPADSETKYSPSFQGQVSFSADKSSNTAYLHWSTLRASDTAMYYCARRSGSSSWYALDFWGQGTMVTVSS

SEQ ID NO: 7550 - protein, 8 aa, synthetic construct
  REGION 1..8: note = tosatoxumab heavy chain CDR1
GYKFGTHW

SEQ ID NO: 7551 - protein, 8 aa, synthetic construct
  REGION 1..8: note = tosatoxumab heavy chain CDR2
IHPADSET

SEQ ID NO: 7552 - protein, 14 aa, synthetic construct
  REGION 1..14: note = tosatoxumab heavy chain CDR3
ARRSGSSSWYALDF

SEQ ID NO: 7553 - protein, 111 aa, synthetic construct
  REGION 1..111: note = tosatoxumab light chain V region
QSVLTQSPSASGTPGQRVTISCSGGSSNIGSNTVNWYQQFPGAAPKLLIYTNNQRPSGVPDRFSGSKSGTSASLAISGLQSEDEADYYCATWDDSLNGLYVFGTGTKVTVL

SEQ ID NO: 7554 - protein, 8 aa, synthetic construct
  REGION 1..8: note = tosatoxumab light chain CDR1
SSNIGSNT

SEQ ID NO: 7555 - skipped

SEQ ID NO: 7556 - protein, 12 aa, synthetic construct
  REGION 1..12: note = tosatoxumab light chain CDR3
ATWDDSLNGLYV

SEQ ID NO: 7557 - protein, 120 aa, synthetic construct
  REGION 1..120: note = tovetumab heavy chain V region
QVQLVESGGGLVKPGGSLRLSCAASGFTFSDYYMNWIRQAPGKGLEWVSYISSSGSIIYYADSVKGRFTISRDNAKNSLYLQMNSLRAEDTAVYYCAREGRIAARGMDVWGQGTTVTVSS

SEQ ID NO: 7558 - protein, 7 aa, synthetic construct
  REGION 1..7: note = tovetumab heavy chain CDR1
GFTFSDY

SEQ ID NO: 7559 - protein, 8 aa, synthetic construct
  REGION 1..8: note = tovetumab heavy chain CDR2
ISSSGSII

SEQ ID NO: 7560 - protein, 13 aa, synthetic construct
  REGION 1..13: note = tovetumab heavy chain CDR3
AREGRIAARGMDV

SEQ ID NO: 7561 - protein, 108 aa, synthetic construct
  REGION 1..108: note = tovetumab light chain V region
DIQMTQSPSSLSASVGDRVSITCRPSQSFSRYINWYQQKPGKAPKLLIHAASSLVGGVPSRFSGSGSGTDFTLTISSLQPEDFATYYCQQTYSNPPITFGQGTRLEMK

SEQ ID NO: 7562 - protein, 6 aa, synthetic construct
  REGION 1..6: note = tovetumab light chain CDR1
QSFSRY

SEQ ID NO: 7563 - skipped

SEQ ID NO: 7564 - protein, 10 aa, synthetic construct
  REGION 1..10: note = tovetumab light chain CDR3
QQTYSNPPIT

SEQ ID NO: 7565 - protein, 126 aa, synthetic construct
  REGION 1..126: note = tozorakimab heavy chain V region
EVQLLESGGGLVQPGGSLRLSCAASGFTFSSYAMSWVRQAPGKGLEWVSGISAIDQSTYYADSVKGRFTISRDNSKNTLYLQMNSLRAEDTAVYYCARQKFMQLWGGGLRYPFGYWGQGTMVTVSS

SEQ ID NO: 7566 - protein, 8 aa, synthetic construct
  REGION 1..8: note = tozorakimab heavy chain CDR1
GFTFSSYA

SEQ ID NO: 7567 - protein, 8 aa, synthetic construct
  REGION 1..8: note = tozorakimab heavy chain CDR2
ISAIDQST

SEQ ID NO: 7568 - protein, 19 aa, synthetic construct
  REGION 1..19: note = tozorakimab heavy chain CDR3
ARQKFMQLWGGGLRYPFGY

SEQ ID NO: 7569 - protein, 106 aa, synthetic construct
  REGION 1..106: note = tozorakimab light chain V region
SYVLTQPPSVSVSPGQTASITCSGEGMGDKYAAWYQQKPGQSPVLVIYRDTKRPSGIPERFSGSNSGNTATLTISGTQAMDEADYYCGVIQDNTGVFGGGTKLTVL

SEQ ID NO: 7570 - protein, 6 aa, synthetic construct
  REGION 1..6: note = tozorakimab light chain CDR1
GMGDKY

SEQ ID NO: 7571 - skipped

SEQ ID NO: 7572 - protein, 9 aa, synthetic construct
  REGION 1..9: note = tozorakimab light chain CDR3
GVIQDNTGV

SEQ ID NO: 7573 - protein, 122 aa, synthetic construct
  REGION 1..122: note = tralokinumab heavy chain V region
QVQLVQSGAEVKKPGASVKVSCKASGYTFTNYGLSWVRQAPGQGLEWMGWISANNGDTNYGQEFQGRVTMTTDTSTSTAYMELRSLRSDDTAVYYCARDSSSSWARWFFDLWGRGTLVTVSS

SEQ ID NO: 7574 - protein, 8 aa, synthetic construct
  REGION 1..8: note = tralokinumab heavy chain CDR1
GYTFTNYG

SEQ ID NO: 7575 - protein, 8 aa, synthetic construct
  REGION 1..8: note = tralokinumab heavy chain CDR2
ISANNGDT

SEQ ID NO: 7576 - protein, 15 aa, synthetic construct
  REGION 1..15: note = tralokinumab heavy chain CDR3
ARDSSSSWARWFFDL

SEQ ID NO: 7577 - protein, 108 aa, synthetic construct
  REGION 1..108: note = tralokinumab light chain V region
SYVLTQPPSVSVAPGKTARITCGGNIIGSKLVHWYQQKPGQAPVLVIYDDGDRPSGIPERFSGSNSGNTATLTISRVEAGDEADYYCQVWDTGSDPVVFGGGTKLTVL

SEQ ID NO: 7578 - protein, 6 aa, synthetic construct
  REGION 1..6: note = tralokinumab light chain CDR1
IIGSKL

SEQ ID NO: 7579 - skipped

SEQ ID NO: 7580 - protein, 11 aa, synthetic construct
  REGION 1..11: note = tralokinumab light chain CDR3
QVWDTGSDPVV

SEQ ID NO: 7581 - protein, 120 aa, synthetic construct [sequence omitted]

SEQ ID NO: 7582 - protein, 8 aa, synthetic construct
  REGION 1..8: note = trastuzumab heavy chain CDR1
GFNIKDTY

SEQ ID NO: 7583 - protein, 8 aa, synthetic construct
  REGION 1..8: note = trastuzumab heavy chain CDR2
IYPTNGYT

SEQ ID NO: 7584 - protein, 13 aa, synthetic construct
  REGION 1..13: note = trastuzumab heavy chain CDR3
SRWGGDGFYAMDY

SEQ ID NO: 7585 - protein, 107 aa, synthetic construct [sequence omitted]

SEQ ID NO: 7586 - protein, 6 aa, synthetic construct
  REGION 1..6: note = trastuzumab light chain CDR1
QDVNTA

SEQ ID NO: 7587 - skipped

SEQ ID NO: 7588 - protein, 9 aa, synthetic construct
  REGION 1..9: note = trastuzumab light chain CDR3
QQHYTTPPT

SEQ ID NO: 7589 - protein, 125 aa, synthetic construct
  REGION 1..125: note = tremelimumab heavy chain V region
QVQLVESGGGVVQPGRSLRLSCAASGFTFSSYGMHWVRQAPGKGLEWVAVIWYDGSNKYYADSVKGRFTISRDNSKNTLYLQMNSLRAEDTAVYYCARDPRGATLYYYYYGMDVWGQGTTVTVSS

SEQ ID NO: 7590 - protein, 8 aa, synthetic construct
  REGION 1..8: note = tremelimumab heavy chain CDR1
GFTFSSYG

SEQ ID NO: 7591 - protein, 8 aa, synthetic construct
  REGION 1..8: note = tremelimumab heavy chain CDR2
IWYDGSNK

SEQ ID NO: 7592 - protein, 18 aa, synthetic construct
  REGION 1..18: note = tremelimumab heavy chain CDR3
ARDPRGATLYYYYYGMDV

SEQ ID NO: 7593 - protein, 107 aa, synthetic construct
  REGION 1..107: note = tremelimumab light chain V region
DIQMTQSPSSLSASVGDRVTITCRASQSINSYLDWYQQKPGKAPKLLIYAASSLQSGVPSRFSGSGSGTDFTLTISSLQPEDFATYYCQQYYSTPFTFGPGTKVEIK

SEQ ID NO: 7594 - protein, 6 aa, synthetic construct
  REGION 1..6: note = tremelimumab light chain CDR1
QSINSY

SEQ ID NO: 7595 - skipped

SEQ ID NO: 7596 - protein, 9 aa, synthetic construct
  REGION 1..9: note = tremelimumab light chain CDR3
QQYYSTPFT

SEQ ID NO: 7597 - protein, 120 aa, synthetic construct
  REGION 1..120: note = trevogrumab heavy chain V region
EVQVLESGGDLVQPGGSLRLSCAASGFTFSAYAMTWVRQAPGKGLEWVSAISGSGGSAYYADSVKGRFTISRDNSKNTVYLQMNSLRAEDTAVYYCAKDGAWKMSGLDVWGQGTTVIVSS

SEQ ID NO: 7598 - protein, 8 aa, synthetic construct
  REGION 1..8: note = trevogrumab heavy chain CDR1
GFTFSAYA

SEQ ID NO: 7599 - protein, 8 aa, synthetic construct
  REGION 1..8: note = trevogrumab heavy chain CDR2
ISGSGGSA

SEQ ID NO: 7600 - protein, 13 aa, synthetic construct
  REGION 1..13: note = trevogrumab heavy chain CDR3
AKDGAWKMSGLDV

SEQ ID NO: 7601 - protein, 107 aa, synthetic construct
  REGION 1..107: note = trevogrumab light chain V region
DIQMTQSPASLSASVGDRVTITCRASQDISDYLAWYQQKPGKIPRLLIYTTSTLQSGVPSRFRGSGSGTDFTLTISSLQPEDVATYYCQKYDSAPLTFGGGTKVEIK

SEQ ID NO: 7602 - protein, 6 aa, synthetic construct
  REGION 1..6: note = trevogrumab light chain CDR1
QDISDY

SEQ ID NO: 7603 - skipped

SEQ ID NO: 7604 - protein, 9 aa, synthetic construct
  REGION 1..9: note = trevogrumab light chain CDR3
QKYDSAPLT

SEQ ID NO: 7605 - protein, 118 aa, synthetic construct
  REGION 1..118: note = tuvonralimab heavy chain V region
QVQLVESGGGVVEPGRSLRLSCAASGFTFSSYGMHWVRQAPGKGLEWVAVIWYKPSEKDYADSAKGRFTISRDNSKNTLYLQMNSLRAEDTAVYYCARGGLLGYFDYWGQGTLVTVSS

SEQ ID NO: 7606 - protein, 7 aa, synthetic construct
  REGION 1..7: note = tuvonralimab heavy chain CDR1
GFTFSSY

SEQ ID NO: 7607 - protein, 8 aa, synthetic construct
  REGION 1..8: note = tuvonralimab heavy chain CDR2
IWYKPSEK

SEQ ID NO: 7608 - protein, 11 aa, synthetic construct
  REGION 1..11: note = tuvonralimab heavy chain CDR3
ARGGLLGYFDY

SEQ ID NO: 7609 - protein, 107 aa, synthetic construct
  REGION 1..107: note = tuvonralimab light chain V region
EIVLTQSPGTLSLSPGERATLSCRASQSINSYLAWYQQKPGQAPRPLIYGVSSRATGIPDRFSGSGSGTDFTLTISRLEPEDFAVYYCQQYGRYPFTFGPGTKVDIK

SEQ ID NO: 7610 - protein, 6 aa, synthetic construct
  REGION 1..6: note = tuvonralimab light chain CDR1
QSINSY

SEQ ID NO: 7611 - skipped

SEQ ID NO: 7612 - protein, 9 aa, synthetic construct
  REGION 1..9: note = tuvonralimab light chain CDR3
QQYGRYPFT

SEQ ID NO: 7613 - protein, 118 aa, synthetic construct
  REGION 1..118: note = ublituximab heavy chain V region
QAYLQQSGAELVRPGASVKMSCKASGYTFTSYNMHWVKQTPRQGLEWIGGIYPGNGDTSYNQKFKGKATLTVGKSSSTAYMQLSSLTSEDSAVYFCARYDYNYAMDYWGQGTSVTVSS

SEQ ID NO: 7614 - protein, 8 aa, synthetic construct
  REGION 1..8: note = ublituximab heavy chain CDR1
GYTFTSYN

SEQ ID NO: 7615 - protein, 8 aa, synthetic construct
  REGION 1..8: note = ublituximab heavy chain CDR2
IYPGNGDT

SEQ ID NO: 7616 - protein, 11 aa, synthetic construct
  REGION 1..11: note = ublituximab heavy chain CDR3
ARYDYNYAMDY

SEQ ID NO: 7617 - protein, 106 aa, synthetic construct
  REGION 1..106: note = ublituximab light chain V region
QIVLSQSPAILSASPGEKVTMTCRASSSVSYMHWYQQKPGSSPKPWIYATSNLASGVPARFSGSGSGTSYSFTISRVEAEDAATYYCQQWTFNPPTFGGGTRLEIK

SEQ ID NO: 7618 - protein, 5 aa, synthetic construct
  REGION 1..5: note = ublituximab light chain CDR1
SSVSY

SEQ ID NO: 7619 - skipped

SEQ ID NO: 7620 - protein, 9 aa, synthetic construct
  REGION 1..9: note = ublituximab light chain CDR3
QQWTFNPPT

SEQ ID NO: 7621 - protein, 125 aa, synthetic construct
  REGION 1..125: note = ulocuplumab heavy chain V region
EVQLVESGGGLVQPGGSLRLSCAAAGFTFSSYSMNWVRQAPGKGLEWVSYISSRSRTIYYADSVKGRFTISRDNAKNSLYLQMNSLRDEDTAVYYCARDYGGQPPYYYYYGMDVWGQGTTVTVSS

SEQ ID NO: 7622 - protein, 8 aa, synthetic construct
  REGION 1..8: note = ulocuplumab heavy chain CDR1
GFTFSSYS

SEQ ID NO: 7623 - protein, 8 aa, synthetic construct
  REGION 1..8: note = ulocuplumab heavy chain CDR2
ISSRSRTI

SEQ ID NO: 7624 - protein, 18 aa, synthetic construct
  REGION 1..18: note = ulocuplumab heavy chain CDR3
ARDYGGQPPYYYYYGMDV

SEQ ID NO: 7625 - protein, 107 aa, synthetic construct
  REGION 1..107: note = ulocuplumab light chain V region
DIQMTQSPSSLSASVGDRVTITCRASQGISSWLAWYQQKPEKAPKSLIYAASSLQSGVPSRFSGSGSGTDFTLTISSLQPEDFVTYYCQQYNSYPRTFGQGTKVEIK

SEQ ID NO: 7626 - protein, 6 aa, synthetic construct
  REGION 1..6: note = ulocuplumab light chain CDR1
QGISSW

SEQ ID NO: 7627 - skipped

SEQ ID NO: 7628 - protein, 9 aa, synthetic construct
  REGION 1..9: note = ulocuplumab light chain CDR3
QQYNSYPRT

SEQ ID NO: 7629 - protein, 125 aa, synthetic construct
  REGION 1..125: note = urabrelimab heavy chain V region
QVQLQESGPGLVKPSGTLSLTCAVSGVSIRSINWWNWVRQPPGKGLEWIGEIYHSGSTNYNPSLKSRVTISVDKSKNQFSLKLNSVTAADTAVYYCARDGGIAVTDYYYYGLDVWGQGTTVTVSS

SEQ ID NO: 7630 - protein, 9 aa, synthetic construct
  REGION 1..9: note = urabrelimab heavy chain CDR1
GVSIRSINW

SEQ ID NO: 7631 - protein, 7 aa, synthetic construct
  REGION 1..7: note = urabrelimab heavy chain CDR2
IYHSGST

SEQ ID NO: 7632 - protein, 18 aa, synthetic construct
  REGION 1..18: note = urabrelimab heavy chain CDR3
ARDGGIAVTDYYYYGLDV

SEQ ID NO: 7633 - protein, 106 aa, synthetic construct
  REGION 1..106: note = urabrelimab light chain V region
EIVLTQSPATLSLSPGERATLSCRASESVSSNLAWYQQKPGQAPRLLIYGAFNRATGIPARFSGSGSGTDFTLTISSLEPEDFAVYYCQQRSDWFTFGGGTKVEIK

SEQ ID NO: 7634 - protein, 6 aa, synthetic construct
  REGION 1..6: note = urabrelimab light chain CDR1
ESVSSN

SEQ ID NO: 7635 - skipped

SEQ ID NO: 7636 - protein, 8 aa, synthetic construct
  REGION 1..8: note = urabrelimab light chain CDR3
QQRSDWFT

SEQ ID NO: 7637 - protein, 121 aa, synthetic construct [sequence omitted]

SEQ ID NO: 7638 - protein, 8 aa, synthetic construct
  REGION 1..8: note = urelumab heavy chain CDR1
GGSFSGYY

SEQ ID NO: 7639 - protein, 7 aa, synthetic construct
  REGION 1..7: note = urelumab heavy chain CDR2
INHGGYV

SEQ ID NO: 7640 - protein, 15 aa, synthetic construct
  REGION 1..15: note = urelumab heavy chain CDR3
ARDYGPGNYDWYFDL

SEQ ID NO: 7641 - protein, 109 aa, synthetic construct
  REGION 1..109: note = urelumab light chain V region
EIVLTQSPATLSLSPGERATLSCRASQSVSSYLAWYQQKPGQAPRLLIYDASNRATGIPARFSGSGSGTDFTLTISSLEPEDFAVYYCQQRSNWPPALTFCGGTKVEIK

SEQ ID NO: 7642 - protein, 6 aa, synthetic construct
  REGION 1..6: note = urelumab light chain CDR1
QSVSSY

SEQ ID NO: 7643 - skipped

SEQ ID NO: 7644 - protein, 13 aa, synthetic construct
  REGION 1..13: note = urelumab light chain CDR3
QQRSNWPPALTFC

SEQ ID NO: 7645 - protein, 119 aa, synthetic construct
  REGION 1..119: note = ustekinumab heavy chain V region
EVQLVQSGAEVKKPGESLKISCKGSGYSFTTYWLGWVRQMPGKGLDWIGIMSPVDSDIRYSPSFQGQVTMSVDKSITTAYLQWNSLKASDTAMYYCARRRPGQGYFDFWGQGTLVTVSS

SEQ ID NO: 7646 - protein, 8 aa, synthetic construct
  REGION 1..8: note = ustekinumab heavy chain CDR1
GYSFTTYW

SEQ ID NO: 7647 - protein, 8 aa, synthetic construct
  REGION 1..8: note = ustekinumab heavy chain CDR2
MSPVDSDI

SEQ ID NO: 7648 - protein, 12 aa, synthetic construct
  REGION 1..12: note = ustekinumab heavy chain CDR3
ARRRPGQGYFDF

SEQ ID NO: 7649 - protein, 107 aa, synthetic construct
  REGION 1..107: note = ustekinumab light chain V region
DIQMTQSPSSLSASVGDRVTITCRASQGISSWLAWYQQKPEKAPKSLIYAASSLQSGVPSRFSGSGSGTDFTLTISSLQPEDFATYYCQQYNIYPYTFGQGTKLEIK

SEQ ID NO: 7650 - protein, 6 aa, synthetic construct
  REGION 1..6: note = ustekinumab light chain CDR1
QGISSW

SEQ ID NO: 7651 - skipped

SEQ ID NO: 7652 - protein, 9 aa, synthetic construct
  REGION 1..9: note = ustekinumab light chain CDR3
QQYNIYPYT

SEQ ID NO: 7653 - protein, 116 aa, synthetic construct
  REGION 1..116: note = utomilumab heavy chain V region
EVQLVQSGAEVKKPGESLRISCKGSGYSFSTYWISWVRQMPGKGLEWMGKIYPGDSYTNYSPSFQGQVTISADKSISTAYLQWSSLKASDTAMYYCARGYGIFDYWGQGTLVTVSS

SEQ ID NO: 7654 - protein, 8 aa, synthetic construct
  REGION 1..8: note = utomilumab heavy chain CDR1
GYSFSTYW

SEQ ID NO: 7655 - protein, 8 aa, synthetic construct
  REGION 1..8: note = utomilumab heavy chain CDR2
IYPGDSYT

SEQ ID NO: 7656 - protein, 9 aa, synthetic construct
  REGION 1..9: note = utomilumab heavy chain CDR3
ARGYGIFDY

SEQ ID NO: 7657 - protein, 108 aa, synthetic construct
  REGION 1..108: note = utomilumab light chain V region
SYELTQPPSVSVSPGQTASITCSGDNIGDQYAHWYQQKPGQSPVLVIYQDKNRPSGIPERFSGSNSGNTATLTISGTQAMDEADYYCATYTGFGSLAVFGGGTKLTVL

SEQ ID NO: 7658 - protein, 6 aa, synthetic construct
  REGION 1..6: note = utomilumab light chain CDR1
NIGDQY

SEQ ID NO: 7659 - skipped

SEQ ID NO: 7660 - protein, 11 aa, synthetic construct
  REGION 1..11: note = utomilumab light chain CDR3
ATYTGFGSLAV

SEQ ID NO: 7661 - protein, 118 aa, synthetic construct
  REGION 1..118: note = vantictumab heavy chain V region
EVQLVESGGGLVQPGGSLRLSCAASGFTFSHYTLSWVRQAPGKGLEWVSVISGDGSYTYYADSVKGRFTISSDNSKNTLYLQMNSLRAEDTAVYYCARNFIKYVFANWGQGTLVTVSS

SEQ ID NO: 7662 - protein, 8 aa, synthetic construct
  REGION 1..8: note = vantictumab heavy chain CDR1
GFTFSHYT

SEQ ID NO: 7663 - protein, 8 aa, synthetic construct
  REGION 1..8: note = vantictumab heavy chain CDR2
ISGDGSYT

SEQ ID NO: 7664 - protein, 11 aa, synthetic construct
  REGION 1..11: note = vantictumab heavy chain CDR3
ARNFIKYVFAN

SEQ ID NO: 7665 - protein, 107 aa, synthetic construct
  REGION 1..107: note = vantictumab light chain V region
DIELTQPPSVSVAPGQTARISCSGDNIGSFYVHWYQQKPGQAPVLVIYDKSNRPSGIPERFSGSNSGNTATLTISGTQAEDEADYYCQSYANTLSLVFGGGTKLTVL

SEQ ID NO: 7666 - protein, 6 aa, synthetic construct
  REGION 1..6: note = vantictumab light chain CDR1
NIGSFY

SEQ ID NO: 7667 - skipped

SEQ ID NO: 7668 - protein, 10 aa, synthetic construct
  REGION 1..10: note = vantictumab light chain CDR3
QSYANTLSLV

SEQ ID NO: 7669 - protein, 126 aa, synthetic construct
  REGION 1..126: note = varisacumab heavy chain V region
QVQLVQSGAEVKKPGASVKVSCKASGGTFSSYAISWVRQAPGQGLEWMGGFDPEDGETIYAQKFQGRVTMTEDTSTDTAYMELSSLRSEDTAVYYCATGRSMVRGVIIPFNGMDVWGQGTTVTVSS

SEQ ID NO: 7670 - protein, 8 aa, synthetic construct
  REGION 1..8: note = varisacumab heavy chain CDR1
GGTFSSYA

SEQ ID NO: 7671 - protein, 8 aa, synthetic construct
  REGION 1..8: note = varisacumab heavy chain CDR2
FDPEDGET

SEQ ID NO: 7672 - protein, 19 aa, synthetic construct
  REGION 1..19: note = varisacumab heavy chain CDR3
ATGRSMVRGVIIPFNGMDV

SEQ ID NO: 7673 - protein, 107 aa, synthetic construct
  REGION 1..107: note = varisacumab light chain V region
DIRMTQSPSSLSASVGDRVTITCRASQSISSYLNWYQQKPGKAPKLLIYAASSLQSGVPSRFSGSGSGTDFTLTISSLQPEDFATYYCQQSYSTPLTFGGGTKVEIK

SEQ ID NO: 7674 - protein, 6 aa, synthetic construct
  REGION 1..6: note = varisacumab light chain CDR1
QSISSY

SEQ ID NO: 7675 - skipped

SEQ ID NO: 7676 - protein, 9 aa, synthetic construct
  REGION 1..9: note = varisacumab light chain CDR3
QQSYSTPLT

SEQ ID NO: 7677 - protein, 119 aa, synthetic construct
  REGION 1..119: note = varlilumab heavy chain V region
QVQLVESGGGVVQPGRSLRLSCAASGFTFSSYDMHWVRQAPGKGLEWVAVIWYDGSNKYYADSVKGRFTISRDNSKNTLYLQMNSLRAEDTAVYYCARGSGNWGFFDYWGQGTLVTVSS

SEQ ID NO: 7678 - protein, 8 aa, synthetic construct
  REGION 1..8: note = varlilumab heavy chain CDR1
GFTFSSYD

SEQ ID NO: 7679 - protein, 8 aa, synthetic construct
  REGION 1..8: note = varlilumab heavy chain CDR2
IWYDGSNK

SEQ ID NO: 7680 - protein, 12 aa, synthetic construct
  REGION 1..12: note = varlilumab heavy chain CDR3
ARGSGNWGFFDY

SEQ ID NO: 7681 - protein, 107 aa, synthetic construct
  REGION 1..107: note = varlilumab light chain V region
DIQMTQSPSSLSASVGDRVTITCRASQGISRWLAWYQQKPEKAPKSLIYAASSLQSGVPSRFSGSGSGTDFTLTISSLQPEDFATYYCQQYNTYPRTFGQGTKVEIK

SEQ ID NO: 7682 - protein, 6 aa, synthetic construct
  REGION 1..6: note = varlilumab light chain CDR1
QGISRW

SEQ ID NO: 7683 - skipped

SEQ ID NO: 7684 - protein, 9 aa, synthetic construct
  REGION 1..9: note = varlilumab light chain CDR3
QQYNTYPRT

SEQ ID NO: 7685 - protein, 121 aa, synthetic construct [sequence omitted]

SEQ ID NO: 7686 - protein, 8 aa, synthetic construct
  REGION 1..8: note = vedolizumab heavy chain CDR1
GYTFTSYW

SEQ ID NO: 7687 - protein, 8 aa, synthetic construct
  REGION 1..8: note = vedolizumab heavy chain CDR2
IDPSESNT

SEQ ID NO: 7688 - protein, 14 aa, synthetic construct
  REGION 1..14: note = vedolizumab heavy chain CDR3
ARGGYDGWDYAIDY

SEQ ID NO: 7689 - protein, 112 aa, synthetic construct [sequence omitted]

SEQ ID NO: 7690 - protein, 11 aa, synthetic construct
  REGION 1..11: note = vedolizumab light chain CDR1
QSLAKSYGNTY

SEQ ID NO: 7691 - skipped

SEQ ID NO: 7692 - protein, 9 aa, synthetic construct
  REGION 1..9: note = vedolizumab light chain CDR3
LQGTHQPYT

SEQ ID NO: 7693 - protein, 123 aa, synthetic construct [sequence omitted]

SEQ ID NO: 7694 - protein, 8 aa, synthetic construct
  REGION 1..8: note = vesencumab heavy chain CDR1
GFTFSSYA

SEQ ID NO: 7695 - protein, 8 aa, synthetic construct
  REGION 1..8: note = vesencumab heavy chain CDR2
ISPAGGYT

SEQ ID NO: 7696 - protein, 16 aa, synthetic construct
  REGION 1..16: note = vesencumab heavy chain CDR3
ARGELPYYRMSKVMDV

SEQ ID NO: 7697 - protein, 107 aa, synthetic construct
  REGION 1..107: note = vesencumab light chain V region
DIQMTQSPSSLSASVGDRVTITCRASQYFSSYLAWYQQKPGKAPKLLIYGASSRASGVPSRFSGSGSGTDFTLTISSLQPEDFATYYCQQYLGSPPTFGQGTKVEIK

SEQ ID NO: 7698 - protein, 6 aa, synthetic construct
  REGION 1..6: note = vesencumab light chain CDR1
QYFSSY

SEQ ID NO: 7699 - skipped

SEQ ID NO: 7700 - protein, 9 aa, synthetic construct
  REGION 1..9: note = vesencumab light chain CDR3
QQYLGSPPT

SEQ ID NO: 7701 - protein, 126 aa, synthetic construct
  REGION 1..126: note = vixarelimab heavy chain V region
QVQLVQSGAEVKKPGASVKVSCKASGYTFTSYEINWVRQATGQGLEWMGWMNPNSGYTGYAQKFQGRVTMTRDTSISTAYMEMSSLRSEDTAVYYCARDIVAANTDYYFYYGMDVWGQGTTVTVSS

SEQ ID NO: 7702 - protein, 8 aa, synthetic construct
  REGION 1..8: note = vixarelimab heavy chain CDR1
GYTFTSYE

SEQ ID NO: 7703 - protein, 8 aa, synthetic construct
  REGION 1..8: note = vixarelimab heavy chain CDR2
MNPNSGYT

SEQ ID NO: 7704 - protein, 19 aa, synthetic construct
  REGION 1..19: note = vixarelimab heavy chain CDR3
ARDIVAANTDYYFYYGMDV

SEQ ID NO: 7705 - protein, 110 aa, synthetic construct
  REGION 1..110: note = vixarelimab light chain V region
QSVLTQPPSASGTPGQRVTISCSGSNSNIGSNTVNWYHQLPGTAPKLLIYNINKRPSGVPDRFSGSKSGSSASLAISGLQSEDEADYYCSTWDDSLDGVVFGGGTKLTVL

SEQ ID NO: 7706 - protein, 8 aa, synthetic construct
  REGION 1..8: note = vixarelimab light chain CDR1
NSNIGSNT

SEQ ID NO: 7707 - skipped

SEQ ID NO: 7708 - protein, 11 aa, synthetic construct
  REGION 1..11: note = vixarelimab light chain CDR3
STWDDSLDGVV

SEQ ID NO: 7709 - protein, 128 aa, synthetic construct
  REGION 1..128: note = volagidemab heavy chain V region
QVQLVESGGGVVQPGRSLRLSCAASGFTFSSYGMHWVRQAPGKGLEWVAVMWYDGSNKDYVDSVKGRFTISRDNSKNTLYLQMNRLRAEDTAVYYCAREKDHYDILTGYNYYYGLDVWGQGTTVTVSS

SEQ ID NO: 7710 - protein, 8 aa, synthetic construct
  REGION 1..8: note = volagidemab heavy chain CDR1
GFTFSSYG

SEQ ID NO: 7711 - protein, 8 aa, synthetic construct
  REGION 1..8: note = volagidemab heavy chain CDR2
MWYDGSNK

SEQ ID NO: 7712 - protein, 21 aa, synthetic construct
  REGION 1..21: note = volagidemab heavy chain CDR3
AREKDHYDILTGYNYYYGLDV

SEQ ID NO: 7713 - protein, 107 aa, synthetic construct
  REGION 1..107: note = volagidemab light chain V region
DIQMTQSPSSLSASVGDRVTITCRASQGIRNDLGWYQQKPGKAPKRLIYAASSLQSGVPSRFSGSGSGTEFTLTISSVQPEDFVTYYCLQHNSNPLTFGGGTKVEIK

SEQ ID NO: 7714 - protein, 6 aa, synthetic construct
  REGION 1..6: note = volagidemab light chain CDR1
QGIRND

SEQ ID NO: 7715 - skipped

SEQ ID NO: 7716 - protein, 9 aa, synthetic construct
  REGION 1..9: note = volagidemab light chain CDR3
LQHNSNPLT

SEQ ID NO: 7717 - protein, 117 aa, synthetic construct
  REGION 1..117: note = vulinacimab heavy chain V region
QVQLVQSGGGLVQPGGSLRLSCAASGFSFSTYAMSWVRQAPGKGLEWVSGISGSGGTTHYADSVKGRFTISRDNSKNTVNLQMNSLRAEDTAVYYCAKGLWFGEGLWGQGTLVTVSS

SEQ ID NO: 7718 - protein, 8 aa, synthetic construct
  REGION 1..8: note = vulinacimab heavy chain CDR1
GFSFSTYA

SEQ ID NO: 7719 - protein, 8 aa, synthetic construct
  REGION 1..8: note = vulinacimab heavy chain CDR2
ISGSGGTT

SEQ ID NO: 7720 - protein, 10 aa, synthetic construct
  REGION 1..10: note = vulinacimab heavy chain CDR3
AKGLWFGEGL

SEQ ID NO: 7721 - protein, 112 aa, synthetic construct
  REGION 1..112: note = vulinacimab light chain V region
DVVMTQSPLSLPVTLGQPASISCRSSQSLYYRSGYTFLDWYVQKPGQSPQLLIYQSSKRDSGVPDRISGSGSGTDFTLRISRVEAEDVGVYYCFQGTHWPYTFGQGTKLEIK

SEQ ID NO: 7722 - protein, 11 aa, synthetic construct
  REGION 1..11: note = vulinacimab light chain CDR1
QSLYYRSGYTF

SEQ ID NO: 7723 - skipped

SEQ ID NO: 7724 - protein, 9 aa, synthetic construct
  REGION 1..9: note = vulinacimab light chain CDR3
FQGTHWPYT

SEQ ID NO: 7725 - protein, 117 aa, synthetic construct
  REGION 1..117: note = xentuzumab heavy chain V region
QVELVESGGGLVQPGGSLRLSCAASGFTFTSYWMSWVRQAPGKGLELVSSITSYGSFTYYADSVKGRFTISRDNSKNTLYLQMNSLRAEDTAVYYCARNMYTHFDSWGQGTLVTVSS

SEQ ID NO: 7726 - protein, 8 aa, synthetic construct
  REGION 1..8: note = xentuzumab heavy chain CDR1
GFTFTSYW

SEQ ID NO: 7727 - protein, 8 aa, synthetic construct
  REGION 1..8: note = xentuzumab heavy chain CDR2
ITSYGSFT

SEQ ID NO: 7728 - protein, 10 aa, synthetic construct
  REGION 1..10: note = xentuzumab heavy chain CDR3
ARNMYTHFDS

SEQ ID NO: 7729 - protein, 110 aa, synthetic construct
  REGION 1..110: note = xentuzumab light chain V region
DIVLTQPPSVSGAPGQRVTISCSGSSSNIGSNSVSWYQQLPGTAPKLLIYDNSKRPSGVPDRFSGSKSGTSASLAITGLQSEDEADYYCQSRDTYGYYWVFGGGTKLTVL

SEQ ID NO: 7730 - protein, 8 aa, synthetic construct
  REGION 1..8: note = xentuzumab light chain CDR1
SSNIGSNS

SEQ ID NO: 7731 - skipped

SEQ ID NO: 7732 - protein, 11 aa, synthetic construct
  REGION 1..11: note = xentuzumab light chain CDR3
QSRDTYGYYWV

SEQ ID NO: 7733 - protein, 118 aa, synthetic construct
  REGION 1..118: note = zalifrelimab heavy chain V region
EVQLVESGGGLVKPGGSLRLSCAASGFTFSSYSMNWVRQAPGKGLEWVSSISSSSSYIYYADSVKGRFTISRDNAKNSLYLQMNSLRAEDTAVYYCARVGLMGPFDIWGQGTMVTVSS

SEQ ID NO: 7734 - protein, 8 aa, synthetic construct
  REGION 1..8: note = zalifrelimab heavy chain CDR1
GFTFSSYS

SEQ ID NO: 7735 - protein, 8 aa, synthetic construct
  REGION 1..8: note = zalifrelimab heavy chain CDR2
ISSSSSYI

SEQ ID NO: 7736 - protein, 11 aa, synthetic construct
  REGION 1..11: note = zalifrelimab heavy chain CDR3
ARVGLMGPFDI

SEQ ID NO: 7737 - protein, 107 aa, synthetic construct; identical to SEQ ID NO: 5533
  REGION 1..107: note = zalifrelimab light chain V region

SEQ ID NO: 7738 - protein, 6 aa, synthetic construct
  REGION 1..6: note = zalifrelimab light chain CDR1
QSVSRY

SEQ ID NO: 7739 - skipped

SEQ ID NO: 7740 - protein, 9 aa, synthetic construct
  REGION 1..9: note = zalifrelimab light chain CDR3
QQYGSSPWT

SEQ ID NO: 7741 - protein, 120 aa, synthetic construct
  REGION 1..120: note = zeluvalimab heavy chain V region
EVQLLESGGGLVQPGGSLRLSCAASGFTFSSYDMSWVRQAPGKGLEWVSLISGGGSQTYYAESVKGRFTISRDNSKNTLYLQMNSLRAEDTAVYFCASPSGHYFYAMDVWGQGTTVTVSS

SEQ ID NO: 7742 - protein, 8 aa, synthetic construct
  REGION 1..8: note = zeluvalimab heavy chain CDR1
GFTFSSYD

SEQ ID NO: 7743 - protein, 8 aa, synthetic construct
  REGION 1..8: note = zeluvalimab heavy chain CDR2
ISGGGSQT

SEQ ID NO: 7744 - protein, 13 aa, synthetic construct
  REGION 1..13: note = zeluvalimab heavy chain CDR3
ASPSGHYFYAMDV

SEQ ID NO: 7745 - protein, 107 aa, synthetic construct
  REGION 1..107: note = zeluvalimab light chain V region
DIQMTQSPSSVSASVGDRVTITCRASQGISNWLAWYQQKPGKAPKLLIFAASSLQSGVPSRFSGSGSGTDFTLTISSLQPEDFATYYCQQAESFPHTFGGGTKVEIK

SEQ ID NO: 7746 - protein, 6 aa, synthetic construct
  REGION 1..6: note = zeluvalimab light chain CDR1
QGISNW

SEQ ID NO: 7747 - skipped

SEQ ID NO: 7748 - protein, 9 aa, synthetic construct
  REGION 1..9: note = zeluvalimab light chain CDR3
QQAESFPHT

SEQ ID NO: 7749 - protein, 120 aa, synthetic construct
  REGION 1..120: note = ziltivekimab heavy chain V region
EVQLVESGGGLVQPGGSLRLSCAASGFTISSNYMIWVRQAPGKGLEWVSDLYYYAGDTYYADSVKGRFTMSRDISKNTVYLQMNSLRAEDTAVYYCARWADDHPPWIDLWGRGTLVTVSS

SEQ ID NO: 7750 - protein, 8 aa, synthetic construct
  REGION 1..8: note = ziltivekimab heavy chain CDR1
GFTISSNY

SEQ ID NO: 7751 - protein, 8 aa, synthetic construct
  REGION 1..8: note = ziltivekimab heavy chain CDR2
LYYYAGDT

SEQ ID NO: 7752 - protein, 13 aa, synthetic construct
  REGION 1..13: note = ziltivekimab heavy chain CDR3
ARWADDHPPWIDL

SEQ ID NO: 7753 - protein, 106 aa, synthetic construct
  REGION 1..106: note = ziltivekimab light chain V region
DIQMTQSPSTLSASVGDRVTITCRASQGISSWLAWYQQKPGKAPKVLIYKASTLESGVPSRFSGSGSGTEFTLTISSLQPDDFATYYCQQSWLGGSFGQGTKLEIK

SEQ ID NO: 7754 - protein, 6 aa, synthetic construct
  REGION 1..6: note = ziltivekimab light chain CDR1
QGISSW

SEQ ID NO: 7755 - skipped

SEQ ID NO: 7756 - protein, 8 aa, synthetic construct
  REGION 1..8: note = ziltivekimab light chain CDR3
QQSWLGGS

SEQ ID NO: 7757 - protein, 123 aa, synthetic construct
  REGION 1..123: note = zimberelimab heavy chain V region
QLQLQESGPGLVKPSETLTLTCTVSADSISSTTYYWVWIRQPPGKGLEWIGSISYSGSTYYNPSLKSRVTVSVDTSKNQFSLKLNSVAATDTALYYCARHLGYNGRYLPFDYWGQGTLVTVSS

SEQ ID NO: 7758 - protein, 10 aa, synthetic construct
  REGION 1..10: note = zimberelimab heavy chain CDR1
ADSISSTTYY

SEQ ID NO: 7759 - protein, 7 aa, synthetic construct
  REGION 1..7: note = zimberelimab heavy chain CDR2
ISYSGST

SEQ ID NO: 7760 - protein, 15 aa, synthetic construct
  REGION 1..15: note = zimberelimab heavy chain CDR3
ARHLGYNGRYLPFDY

SEQ ID NO: 7761 - protein, 110 aa, synthetic construct
  REGION 1..110: note = zimberelimab light chain V region
QSALTQPASVSGSPGQSITISCTGTSSDVGFYNYVSWYQQHPGKAPELMIYDVSNRPSGVSDRFSGSKSGNTASLTISGLQAEDEADYYCSSYTSISTWVFGGGTKLTVL

SEQ ID NO: 7762 - protein, 9 aa, synthetic construct
  REGION 1..9: note = zimberelimab light chain CDR1
SSDVGFYNY

SEQ ID NO: 7763 - skipped

SEQ ID NO: 7764 - protein, 10 aa, synthetic construct
  REGION 1..10: note = zimberelimab light chain CDR3
SSYTSISTWV
